(19) United States
(12) Patent Application Publication
(10) Pub. No.: US 2003/0219743 A1
(43) Pub. Date: Nov. 27, 2003

(54) Novel nucleic acids and polypeptides

(76) Inventors: Y. Tom Tang, San Jose, CA (US); Chenghua Liu, San Jose, CA (US); Vinod Asundi, Foster City, CA (US); Feiyan Ren, Cupertino, CA (US); Radoje T. Drmanac, Palo Alto, CA (US)

Correspondence Address: Luisa Bigornia, HYSEQ, INC., 670 Almanor Avenue, Sunnyvale, CA, 94085, US

(21) Appl. No.: 10/115,831

(22) Filed: Apr. 2, 2002

Related U.S. Application Data
(62) Division of application No. 09/667,298, filed on Sep. 22, 2000, now abandoned.
Application No. 09/667,298 is a continuation-in-part of application No. 09/577,408, filed on May 18, 2000, now abandoned.

(51) Int. Cl. C12Q 1/68; G01N 33/53; G06F 19/00; G01N 33/48; G01N 33/50; C07H 21/04; A61K 39/395; C07K 14/47

(52) U.S. Cl. 435/6; 435/7.1; 435/69.1; 435/183; 435/320.1; 435/325; 424/130.1; 514/12; 530/350; 536/23.2; 702/19

(57) ABSTRACT

The present invention provides novel nucleic acids, novel polypeptide sequences encoded by these nucleic acids and uses thereof.

### 1. CROSS REFERENCE TO RELATED APPLICATIONS

[0001] This application is a continuation-in-part application of U.S. application Ser. No. 09/577,408, filed May 18, 2000, Attorney Docket No. 792, incorporated herein by reference in its entirety.

### 2. BACKGROUND OF THE INVENTION

[0002] 2.1 Technical Field

[0003] The present invention provides novel polynucleotides and proteins encoded by such polynucleotides, along with uses for these polynucleotides and proteins, for example in therapeutic, diagnostic and research methods.

[0004] 2.2 Background

[0005] Technology aimed at the discovery of protein factors (including e.g., cytokines, such as lymphokines, interferons, CSFs, chemokines, and interleukins) has matured rapidly over the past decade. The now routine hybridization cloning and expression cloning techniques clone novel polynucleotides “directly” in the sense that they rely on information directly related to the discovered protein (i.e., partial DNA/amino acid sequence of the protein in the case of hybridization cloning; activity of the protein in the case of expression cloning). More recent “indirect” cloning techniques such as signal sequence cloning, which isolates DNA sequences based on the presence of a now well-recognized secretory leader sequence motif, as well as various PCR-based or low stringency hybridization-based cloning techniques, have advanced the state of the art by making available large numbers of DNA/amino acid sequences for proteins that are known to have biological activity, for example, by virtue of their secreted nature in the case of leader sequence cloning, by virtue of their cell or tissue source in the case of PCR-based techniques, or by virtue of structural similarity to other genes of known biological activity.

[0006] Identified polynucleotide and polypeptide sequences have numerous applications in, for example, diagnostics, forensics, gene mapping; identification of mutations responsible for genetic disorders or other traits, to assess biodiversity, and to produce many other types of data and products dependent on DNA and amino acid sequences.

### 3. SUMMARY OF THE INVENTION

[0007] The compositions of the present invention include novel isolated polypeptides, novel isolated polynucleotides encoding such polypeptides, including recombinant DNA molecules, cloned genes or degenerate variants thereof, especially naturally occurring variants such as allelic variants, antisense polynucleotide molecules, and antibodies that specifically recognize one or more epitopes present on such polypeptides, as well as hybridomas producing such antibodies.

[0008] The compositions of the present invention additionally include vectors, including expression vectors, containing the polynucleotides of the invention, cells genetically engineered to contain such polynucleotides and cells genetically engineered to express such polynucleotides.

[0009] The present invention relates to a collection or library of at least one novel nucleic acid sequence assembled from expressed sequence tags (ESTs) isolated mainly by sequencing by hybridization (SBH), and in some cases, sequences obtained from one or more public databases. The invention relates also to the proteins encoded by such polynucleotides, along with therapeutic, diagnostic and research utilities for these polynucleotides and proteins. These nucleic acid sequences are designated as SEQ ID NO: 1-178 and are provided in the Sequence Listing. In the nucleic acids provided in the Sequence Listing, A is adenosine; C is cytosine; G is guanosine; T is thymine; and N is any of the four bases. In the amino acids provided in the Sequence Listing, * corresponds to the stop codon.

[0010] The nucleic acid sequences of the present invention also include, nucleic acid sequences that hybridize to the complement of SEQ ID NO: 1-178 under stringent hybridization conditions; nucleic acid sequences which are allelic variants or species homologues of any of the nucleic acid sequences recited above, or nucleic acid sequences that encode a peptide comprising a specific domain or truncation of the peptides encoded by SEQ ID NO: 1-178. A polynucleotide comprising a nucleotide sequence having at least 90% identity to an identifying sequence of SEQ ID NO: 1-178 or a degenerate variant or fragment thereof. The identifying sequence can be 100 base pairs in length.

[0011] The nucleic acid sequences of the present invention also include the sequence information from the nucleic acid sequences of SEQ ID NO: 1-178. The sequence information can be a segment of any one of SEQ ID NO: 1-178 that uniquely identifies or represents the sequence information of SEQ ID NO: 1-178.

[0012] A collection as used in this application can be a collection of only one polynucleotide. The collection of sequence information or identifying information of each sequence can be provided on a nucleic acid array. In one embodiment, segments of sequence information is provided on a nucleic acid array to detect the polynucleotide that contains the segment. The array can be designed to detect full-match or mismatch to the polynucleotide that contains the segment. The collection can also be provided in a computer-readable format.

[0013] This invention also includes the reverse or direct complement of any of the nucleic acid sequences recited above; cloning or expression vectors containing the nucleic acid sequences; and host cells or organisms transformed with these expression vectors. Nucleic acid sequences (or their reverse or direct complements) according to the invention have numerous applications in a variety of techniques known to those skilled in the art of molecular biology, such as use as hybridization probes, use as primers for PCR, use in an array, use in computer-readable media, use in sequencing full-length genes, use for chromosome and gene mapping, use in the recombinant production of protein, and use in the generation of anti-sense DNA or RNA, their chemical analogs and the like.

[0014] In a preferred embodiment, the nucleic acid sequences of SEQ ID NO: 1-178 or novel segments or parts of the nucleic acids of the invention are used as primers in expression assays that are well known in the art. In a particularly preferred embodiment, the nucleic acid sequences of SEQ ID NO: 1-178 or novel segments or parts of the nucleic acids provided herein are used in diagnostics for identifying expressed genes or, as well known in the art and exemplified by Vollrath et al., Science 258:52-59 (1992), as expressed sequence tags for physical mapping of the human genome.

[0015] The isolated polynucleotides of the invention include, but are not limited to, a polynucleotide comprising any one of the nucleotide sequences set forth in SEQ ID NO: 1-178; a polynucleotide comprising any of the full length protein coding sequences of SEQ ID NO: 1-178; and a polynucleotide comprising any of the nucleotide sequences of the mature protein coding sequences of SEQ ID NO: 1-178. The polynucleotides of the present invention also include, but are not limited to, a polynucleotide that hybridizes under stringent hybridization conditions to (a) the complement of any one of the nucleotide sequences set forth in SEQ ID NO: 1-178; (b) a nucleotide sequence encoding any one of the amino acid sequences set forth in the Sequence Listing; (c) a polynucleotide which is an allelic variant of any polynucleotides recited above; (d) a polynucleotide which encodes a species homolog (e.g. orthologs) of any of the proteins recited above; or (e) a polynucleotide that encodes a polypeptide comprising a specific domain or truncation of any of the polypeptides comprising an amino acid sequence set forth in the Sequence Listing.

[0016] The isolated polypeptides of the invention include, but are not limited to, a polypeptide comprising any of the amino acid sequences set forth in the Sequence Listing; or the corresponding full length or mature protein. Polypeptides of the invention also include polypeptides with biological activity that are encoded by (a) any of the polynucleotides having a nucleotide sequence set forth in SEQ ID NO: 1-178; or (b) polynucleotides that hybridize to the complement of the polynucleotides of (a) under stringent hybridization conditions. Biologically or immunologically active variants of any of the polypeptide sequences in the Sequence Listing, and “substantial equivalents” thereof (e.g., with at least about 65%, 70%, 75%, 80%, 85%, 90%, 95%, 98% or 99% amino acid sequence identity) that preferably retain biological activity are also contemplated. The polypeptides of the invention may be wholly or partially chemically synthesized but are preferably produced by recombinant means using the genetically engineered cells (e.g. host cells) of the invention.

[0017] The invention also provides compositions comprising a polypeptide of the invention. Polypeptide compositions of the invention may further comprise an acceptable carrier, such as a hydrophilic, e.g., pharmaceutically acceptable, carrier.

[0018] The invention also provides host cells transformed or transfected with a polynucleotide of the invention.

[0019] The invention also relates to methods for producing a polypeptide of the invention comprising growing a culture of the host cells of the invention in a suitable culture medium under conditions permitting expression of the desired polypeptide, and purifying the polypeptide from the culture or from the host cells. Preferred embodiments include those in which the protein produced by such process is a mature form of the protein.

[0020] Polynucleotides according to the invention have numerous applications in a variety of techniques known to those skilled in the art of molecular biology. These techniques include use as hybridization probes, use as oligomers, or primers, for PCR, use for chromosome and gene mapping, use in the recombinant production of protein, and use in generation of anti-sense DNA or RNA, their chemical analogs and the like. For example, when the expression of an mRNA is largely restricted to a particular cell or tissue type, polynucleotides of the invention can be used as hybridization probes to detect the presence of the particular cell or tissue mRNA in a sample using, e.g., in situ hybridization.

[0021] In other exemplary embodiments, the polynucleotides are used in diagnostics as expressed sequence tags for identifying expressed genes or, as well known in the art and exemplified by Vollrath et al., Science 258:52-59 (1992), as expressed sequence tags for physical mapping of the human genome.

[0022] The polypeptides according to the invention can be used in a variety of conventional procedures and methods that are currently applied to other proteins. For example, a polypeptide of the invention can be used to generate an antibody that specifically binds the polypeptide. Such antibodies, particularly monoclonal antibodies, are useful for detecting or quantitating the polypeptide in tissue. The polypeptides of the invention can also be used as molecular weight markers, and as a food supplement.

[0023] Methods are also provided for preventing, treating, or ameliorating a medical condition which comprises the step of administering to a mammalian subject a therapeutically effective amount of a composition comprising a polypeptide of the present invention and a pharmaceutically acceptable carrier.

[0024] In particular, the polypeptides and polynucleotides of the invention can be utilized, for example, in methods for the prevention and/or treatment of disorders involving aberrant protein expression or biological activity.

[0025] The present invention further relates to methods for detecting the presence of the polynucleotides or polypeptides of the invention in a sample. Such methods can, for example, be utilized as part of prognostic and diagnostic evaluation of disorders as recited herein and for the identification of subjects exhibiting a predisposition to such conditions. The invention provides a method for detecting the polynucleotides of the invention in a sample, comprising contacting the sample with a compound that binds to and forms a complex with the polynucleotide of interest for a period sufficient to form the complex and under conditions sufficient to form a complex and detecting the complex such that if a complex is detected, the polynucleotide of interest is detected. The invention also provides a method for detecting the polypeptides of the invention in a sample comprising contacting the sample with a compound that binds to and forms a complex with the polypeptide under conditions and for a period sufficient to form the complex and detecting the formation of the complex such that if a complex is formed, the polypeptide is detected.

[0026] The invention also provides kits comprising polynucleotide probes and/or monoclonal antibodies, and optionally quantitative standards, for carrying out methods of the invention. Furthermore, the invention provides methods for evaluating the efficacy of drugs, and monitoring the progress of patients, involved in clinical trials for the treatment of disorders as recited above.

[0027] The invention also provides methods for the identification of compounds that modulate (i.e., increase or decrease) the expression or activity of the polynucleotides and/or polypeptides of the invention. Such methods can be utilized, for example, for the identification of compounds that can ameliorate symptoms of disorders as recited herein. Such methods can include, but are not limited to, assays for identifying compounds and other substances that interact with (e.g., bind to) the polypeptides of the invention. The invention provides a method for identifying a compound that binds to the polypeptides of the invention comprising contacting the compound with a polypeptide of the invention in a cell for a time sufficient to form a polypeptide/compound complex, wherein the complex drives expression of a reporter gene sequence in the cell; and detecting the complex by detecting the reporter gene sequence expression such that if expression of the reporter gene is detected the compound the binds to a polypeptide of the invention is identified.

[0028] The methods of the invention also provides methods for treatment which involve the administration of the polynucleotides or polypeptides of the invention to individuals exhibiting symptoms or tendencies. In addition, the invention encompasses methods for treating diseases or disorders as recited herein comprising administering compounds and other substances that modulate the overall activity of the target gene products. Compounds and other substances can effect such modulation either on the level of target gene/protein expression or target protein activity.

[0029] The polypeptides of the present invention and the polynucleotides encoding them are also useful for the same functions known to one of skill in the art as the polypeptides and polynucleotides to which they have homology (set forth in Table 1); for which they have a signature region (as set forth in Table 3); or for which they have homology to a gene family (as set forth in Table 4). If no homology is set forth for a sequence, then the polypeptides and polynucleotides of the present invention are useful for a variety of applications, as described herein, including use in arrays for detection.

### 4. DETAILED DESCRIPTION OF THE INVENTION

[0030] 4.1 Definitions

[0031] It must be noted that as used herein and in the appended claims, the singular forms “a”, “an” and “the” include plural references unless the context clearly dictates otherwise.

[0032] The term “active” refers to those forms of the polypeptide which retain the biologic and/or immunologic activities of any naturally occurring polypeptide. According to the invention, the terms “biologically active” or “biological activity” refer to a protein or peptide having structural, regulatory or biochemical functions of a naturally occurring molecule. Likewise “immunologically active” or “immunological activity” refers to the capability of the natural, recombinant or synthetic polypeptide to induce a specific immune response in appropriate animals or cells and to bind with specific antibodies.

[0033] The term “activated cells” as used in this application are those cells which are engaged in extracellular or intracellular membrane trafficking, including the export of secretory or enzymatic molecules as part of a normal or disease process.

[0034] The terms “complementary” or “complementarity” refer to the natural binding of polynucleotides by base pairing. For example, the sequence 5′-AGT-3′ binds to the complementary sequence 3′-TCA-5′. Complementarity between two single-stranded molecules may be “partial” such that only some of the nucleic acids bind or it may be “complete” such that total complementarity exists between the single stranded molecules. The degree of complementarity between the nucleic acid strands has significant effects on the efficiency and strength of the hybridization between the nucleic acid strands.

[0035] The term “embryonic stem cells (ES)” refers to a cell that can give rise to many differentiated cell types in an embryo or an adult, including the germ cells. The term “germ line stem cells (GSCs)” refers to stem cells derived from primordial stem cells that provide a steady and continuous source of germ cells for the production of gametes. The term “primordial germ cells (PGCs)” refers to a small population of cells set aside from other cell lineages particularly from the yolk sac, mesenteries, or gonadal ridges during embryogenesis that have the potential to differentiate into germ cells and other cells. PGCs are the source from which GSCs and ES cells are derived The PGCs, the GSCs and the ES cells are capable of self-renewal. Thus these cells not only populate the germ line and give rise to a plurality of terminally differentiated cells that comprise the adult specialized organs, but are able to regenerate themselves.

[0036] The term “expression modulating fragment,” EMF, means a series of nucleotides which modulates the expression of an operably linked ORF or another EMF.

[0037] As used herein, a sequence is said to “modulate the expression of an operably linked sequence” when the expression of the sequence is altered by the presence of the EMF. EMFs include, but are not limited to, promoters, and promoter modulating sequences (inducible elements). One class of EMFs are nucleic acid fragments which induce the expression of an operably linked ORF in response to a specific regulatory factor or physiological event.

[0038] The terms “nucleotide sequence” or “nucleic acid” or “polynucleotide” or “oligonculeotide” are used interchangeably and refer to a heteropolymer of nucleotides or the sequence of these nucleotides. These phrases also refer to DNA or RNA of genomic or synthetic origin which may be single-stranded or double-stranded and may represent the sense or the antisense strand, to peptide nucleic acid (PNA) or to any DNA-like or RNA-like material. It is contemplated that where the polynucleotide is RNA, the T (thymine) in the sequences provided herein is substituted with U (uracil). Generally, nucleic acid segments provided by this invention may be assembled from fragments of the genome and short oligonucleotide linkers, or from a series of oligonucleotides, or from individual nucleotides, to provide a synthetic nucleic acid which is capable of being expressed in a recombinant transcriptional unit comprising regulatory elements derived from a microbial or viral operon, or a eukaryotic gene.

[0039] The terms “oligonucleotide fragment” or a “polynucleotide fragment”, “portion,” or “segment” or “probe” or “primer” are used interchangeable and refer to a sequence of nucleotide residues which are at least about 5 nucleotides, more preferably at least about 7 nucleotides, more preferably at least about 9 nucleotides, more preferably at least about 11 nucleotides and most preferably at least about 17 nucleotides . The fragment is preferably less than about 500 nucleotides, preferably less than about 200 nucleotides, more preferably less than about 100 nucleotides, more preferably less than about 50 nucleotides and most preferably less than 30 nucleotides. Preferably the probe is from about 6 nucleotides to about 200 nucleotides, preferably from about 15 to about 50 nucleotides, more preferably from about 17 to 30 nucleotides and most preferably from about 20 to 25 nucleotides. Preferably the fragments can be used in polymerase chain reaction (PCR), various hybridization procedures or microarray procedures to identify or amplify identical or related parts of mRNA or DNA molecules. A fragment or segment may uniquely identify each polynucleotide sequence of the present invention. Preferably the fragment comprises a sequence substantially similar to any one of SEQ ID NOs:1-178.

[0040] Probes may, for example, be used to determine whether specific mRNA molecules are present in a cell or tissue or to isolate similar nucleic acid sequences from chromosomal DNA as described by Walsh et al. (Walsh, P. S. et al., 1992, PCR Methods Appl 1:241-250). They may be labeled by nick translation, Klenow fill-in reaction, PCR, or other methods well known in the art. Probes of the present invention, their preparation and/or labeling are elaborated in Sambrook, J. et al., 1989, Molecular Cloning: A Laboratory Manual, Cold Spring Harbor Laboratory, New York; or Ausubel, F. M. et al., 1989, Current Protocols in Molecular Biology, John Wiley & Sons, New York N.Y., both of which are incorporated herein by reference in their entirety.

[0041] The nucleic acid sequences of the present invention also include the sequence information from the nucleic acid sequences of SEQ ID NOs: 1-78. The sequence information can be a segment of any one of SEQ ID NOs: 1-178 that uniquely identifies or represents the sequence information of that sequence of SEQ ID NO: 1-178. One such segment can be a twenty-mer nucleic acid sequence because the probability that a twenty-mer is fully matched in the human genome is 1 in 300. In the human genome, there are three billion base pairs in one set of chromosomes. Because 4²⁰ possible twenty-mers exist, there are 300 times more twenty-mers than there are base pairs in a set of human chromosome. Using the same analysis, the probability for a seventeen-mer to be fully matched in the human genome is approximately 1 in 5. When these segments are used in arrays for expression studies, fifteen-mer segments can be used. The probability that the fifteen-mer is fully matched in the expressed sequences is also approximately one in five because expressed sequences comprise less than approximately 5% of the entire genome sequence.

[0042] Similarly, when using sequence information for detecting a single mismatch, a segment can be a twenty-five mer. The probability that the twenty-five mer would appear in a human genome with a single mismatch is calculated by multiplying the probability for a full match (1÷4²⁵) times the increased probability for mismatch at each nucleotide position (3×25). The probability that an eighteen mer with a single mismatch can be detected in an array for expression studies is approximately one in five. The probability that a twenty-mer with a single mismatch can be detected in a human genome is approximately one in five.

[0043] The term “open reading frame,” ORF, means a series of nucleotide triplets coding for amino acids without any termination codons and is a sequence translatable into protein.

[0044] The terms “operably linked” or “operably associated” refer to functionally related nucleic acid sequences. For example, a promoter is operably associated or operably linked with a coding sequence if the promoter controls the transcription of the coding sequence. While operably linked nucleic acid sequences can be contiguous and in the same reading frame, certain genetic elements e.g. repressor genes are not contiguously linked to the coding sequence but still control transcription/translation of the coding sequence.

[0045] The term “pluripotent” refers to the capability of a cell to differentiate into a number of differentiated cell types that are present in an adult organism. A pluripotent cell is restricted in its differentiation capability in comparison to a totipotent cell.

[0046] The terms “polypeptide” or “peptide” or “amino acid sequence” refer to an oligopeptide, peptide, polypeptide or protein sequence or fragment thereof and to naturally occurring or synthetic molecules. A polypeptide “fragment,” “portion,” or “segment” is a stretch of amino acid residues of at least about 5 amino acids, preferably at least about 7 amino acids, more preferably at least about 9 amino acids and most preferably at least about 17 or more amino acids. The peptide preferably is not greater than about 200 amino acids, more preferably less than 150 amino acids and most preferably less than 100 amino acids. Preferably the peptide is from about 5 to about 200 amino acids. To be active, any polypeptide must have sufficient length to display biological and/or immunological activity.

[0047] The term “naturally occurring polypeptide” refers to polypeptides produced by cells that have not been genetically engineered and specifically contemplates various polypeptides arising from post-translational modifications of the polypeptide including, but not limited to, acetylation, carboxylation, glycosylation, phosphorylation, lipidation and acylation.

[0048] The term “translated protein coding portion” means a sequence which encodes for the full length protein which may include any leader sequence or any processing sequence.

[0049] The term “mature protein coding sequence” means a sequence which encodes a peptide or protein without a signal or leader sequence. The peptide may have been produced by processing in the cell which removes any leader/signal sequence. The peptide may be produced synthetically or the protein may have been produced using a polynucleotide only encoding for the mature protein coding sequence.

[0050] The term “derivative” refers to polypeptides chemically modified by such techniques as ubiquitination, labeling (e.g., with radionuclides or various enzymes), covalent polymer attachment such as pegylation (derivatization with polyethylene glycol) and insertion or substitution by chemical synthesis of amino acids such as ornithine, which do not normally occur in human proteins.

[0051] The term “variant” (or “analog”) refers to any polypeptide differing from naturally occurring polypeptides by amino acid insertions, deletions, and substitutions, created using, e g., recombinant DNA techniques. Guidance in determining which amino acid residues may be replaced, added or deleted without abolishing activities of interest, may be found by comparing the sequence of the particular polypeptide with that of homologous peptides and minimizing the number of amino acid sequence changes made in regions of high homology (conserved regions) or by replacing amino acids with consensus sequence.

[0052] Alternatively, recombinant variants encoding these same or similar polypeptides may be synthesized or selected by making use of the “redundancy” in the genetic code. Various codon substitutions, such as the silent changes which produce various restriction sites, may be introduced to optimize cloning into a plasmid or viral vector or expression in a particular prokaryotic or eukaryotic system. Mutations in the polynucleotide sequence may be reflected in the polypeptide or domains of other peptides added to the polypeptide to modify the properties of any part of the polypeptide, to change characteristics such as ligand-binding affinities, interchain affinities, or degradation/turnover rate.

[0053] Preferably, amino acid “substitutions” are the result of replacing one amino acid with another amino acid having similar structural and/or chemical properties, i.e., conservative amino acid replacements. “Conservative” amino acid substitutions may be made on the basis of similarity in polarity, charge, solubility, hydrophobicity, hydrophilicity, and/or the amphipathic nature of the residues involved. For example, nonpolar (hydrophobic) amino acids include alanine, leucine, isoleucine, valine, proline, phenylalanine, tryptophan, and methionine; polar neutral amino acids include glycine, serine, threonine, cysteine, tyrosine, asparagine, and glutamine; positively charged (basic) amino acids include arginine, lysine, and histidine; and negatively charged (acidic) amino acids include aspartic acid and glutamic acid. “Insertions” or “deletions” are preferably in the range of about 1 to 20 amino acids, more preferably 1 to 10 amino acids. The variation allowed may be experimentally determined by systematically making insertions, deletions, or substitutions of amino acids in a polypeptide molecule using recombinant DNA techniques and assaying the resulting recombinant variants for activity.

[0054] Alternatively, where alteration of function is desired, insertions, deletions or non-conservative alterations can be engineered to produce altered polypeptides. Such alterations can, for example, alter one or more of the biological functions or biochemical characteristics of the polypeptides of the invention. For example, such alterations may change polypeptide characteristics such as ligand-binding affinities, interchain affinities, or degradation/turnover rate. Further, such alterations can be selected so as to generate polypeptides that are better suited for expression, scale up and the like in the host cells chosen for expression. For example, cysteine residues can be deleted or substituted with another amino acid residue in order to eliminate disulfide bridges.

[0055] The terms “purified” or “substantially purified” as used herein denotes that the indicated nucleic acid or polypeptide is present in the substantial absence of other biological macromolecules, e.g., polynucleotides, proteins, and the like. In one embodiment, the polynucleotide or polypeptide is purified such that it constitutes at least 95% by weight, more preferably at least 99% by weight, of the indicated biological macromolecules present (but water, buffers, and other small molecules, especially molecules having a molecular weight of less than 1000 daltons, can be present).

[0056] The term “isolated” as used herein refers to a nucleic acid or polypeptide separated from at least one other component (e.g., nucleic acid or polypeptide) present with the nucleic acid or polypeptide in its natural source. In one embodiment, the nucleic acid or polypeptide is found in the presence of (if anything) only a solvent, buffer, ion, or other component normally present in a solution of the same. The terms “isolated” and “purified” do not encompass nucleic acids or polypeptides present in their natural source.

[0057] The term “recombinant,” when used herein to refer to a polypeptide or protein, means that a polypeptide or protein is derived from recombinant (e.g., microbial, insect, or mammalian) expression systems. “Microbial” refers to recombinant polypeptides or proteins made in bacterial or fungal (e.g., yeast) expression systems. As a product, “recombinant microbial” defines a polypeptide or protein essentially free of native endogenous substances and unaccompanied by associated native glycosylation. Polypeptides or proteins expressed in most bacterial cultures, e.g., E. coli, will be free of glycosylation modifications; polypeptides or proteins expressed in yeast will have a glycosylation pattern in general different from those expressed in mammalian cells.

[0058] The term “recombinant expression vehicle or vector” refers to a plasmid or phage or virus or vector, for expressing a polypeptide from a DNA (RNA) sequence. An expression vehicle can comprise a transcriptional unit comprising an assembly of (1) a genetic element or elements having a regulatory role in gene expression, for example, promoters or enhancers, (2) a structural or coding sequence which is transcribed into mRNA and translated into protein, and (3) appropriate transcription initiation and termination sequences. Structural units intended for use in yeast or eukaryotic expression systems preferably include a leader sequence enabling extracellular secretion of translated protein by a host cell. Alternatively, where recombinant protein is expressed without a leader or transport sequence, it may include an amino terminal methionine residue. This residue may or may not be subsequently cleaved from the expressed recombinant protein to provide a final product.

[0059] The term “recombinant expression system” means host cells which have stably integrated a recombinant transcriptional unit into chromosomal DNA or carry the recombinant transcriptional unit extrachromosomally. Recombinant expression systems as defined herein will express heterologous polypeptides or proteins upon induction of the regulatory elements linked to the DNA segment or synthetic gene to be expressed. This term also means host cells which have stably integrated a recombinant genetic element or elements having a regulatory role in gene expression, for example, promoters or enhancers. Recombinant expression systems as defined herein will express polypeptides or proteins endogenous to the cell upon induction of the regulatory elements linked to the endogenous DNA segment or gene to be expressed. The cells can be prokaryotic or eukaryotic.

[0060] The term “secreted” includes a protein that is transported across or through a membrane, including transport as a result of signal sequences in its amino acid sequence when it is expressed in a suitable host cell. “Secreted” proteins include without limitation proteins secreted wholly (e.g., soluble proteins) or partially (e.g., receptors) from the cell in which they are expressed. “Secreted” proteins also include without limitation proteins that are transported across the membrane of the endoplasmic reticulum. “Secreted” proteins are also intended to include proteins containing non-typical signal sequences (e.g. Interleukin-1 Beta, see Krasney, P. A. and Young, P. R. (1992) Cytokine 4(2):134-143) and factors released from damaged cells (e.g. Interleukin-1 Receptor Antagonist, see Arend, W. P. et. al. (1998) Annu. Rev. Immunol. 16:27-55)

[0061] Where desired, an expression vector may be designed to contain a “signal or leader sequence” which will direct the polypeptide through the membrane of a cell. Such a sequence may be naturally present on the polypeptides of the present invention or provided from heterologous protein sources by recombinant DNA techniques.

[0062] The term “stringent” is used to refer to conditions that are commonly understood in the art as stringent. Stringent conditions can include highly stringent conditions (i.e., hybridization to filter-bound DNA in 0.5 M NaHPO₄, 7% sodium dodecyl sulfate (SDS), 1 mM EDTA at 65° C., and washing in 0.1× SSC/0.1% SDS at 68° C.), and moderately stringent conditions (i.e., washing in 0.2×SSC/0.1% SDS at 42° C.). Other exemplary hybridization conditions are described herein in the examples.

[0063] In instances of hybridization of deoxyoligonucleotides, additional exemplary stringent hybridization conditions include washing in 6× SSC/0.05% sodium pyrophosphate at 37° C. (for 14-base oligonucleotides), 48° C. (for 17-base oligos), 55° C. (for 20-base oligonucleotides), and 60° C. (for 23-base oligonucleotides).

[0064] As used herein, “substantially equivalent” can refer both to nucleotide and amino acid sequences, for example a mutant sequence, that varies from a reference sequence by one or more substitutions, deletions, or additions, the net effect of which does not result in an adverse functional dissimilarity between the reference and subject sequences. Typically, such a substantially equivalent sequence varies from one of those listed herein by no more than about 35% (i.e., the number of individual residue substitutions, additions, and/or deletions in a substantially equivalent sequence, as compared to the corresponding reference sequence, divided by the total number of residues in the substantially equivalent sequence is about 0.35 or less). Such a sequence is said to have 65% sequence identity to the listed sequence. In one embodiment, a substantially equivalent, e.g., mutant, sequence of the invention varies from a listed sequence by no more than 30% (70% sequence identity); in a variation of this embodiment, by no more than 25% (75% sequence identity); and in a further variation of this embodiment, by no more than 20% (80% sequence identity) and in a further variation of this embodiment, by no more than 10% (90% sequence identity) and in a further variation of this embodiment, by no more that 5% (95% sequence identity). Substantially equivalent, e.g., mutant, amino acid sequences according to the invention preferably have at least 80% sequence identity with a listed amino acid sequence, more preferably at least 90% sequence identity. Substantially equivalent nucleotide sequences of the invention can have lower percent sequence identities, taking into account, for example, the redundancy or degeneracy of the genetic code. Preferably, nucleotide sequence has at least about 65% identity, more preferably at least about 75% identity, and most preferably at least about 95% identity. For the purposes of the present invention, sequences having substantially equivalent biological activity and substantially equivalent expression characteristics are considered substantially equivalent. For the purposes of determining equivalence, truncation of the mature sequence (e.g., via a mutation which creates a spurious stop codon) should be disregarded. Sequence identity may be determined, e.g., using the Jotun Hein method (Hein, J. (1990) Methods Enzymol. 183:626-645). Identity between sequences can also be determined by other methods known in the art, e.g. by varying hybridization conditions.

[0065] The term “totipotent” refers to the capability of a cell to differentiate into all of the cell types of an adult organism.

[0066] The term “transformation” means introducing DNA into a suitable host cell so that the DNA is replicable, either as an extrachromosomal element, or by chromosomal integration. The term “transfection” refers to the taking up of an expression vector by a suitable host cell, whether or not any coding sequences are in fact expressed. The term “infection” refers to the introduction of nucleic acids into a suitable host cell by use of a virus or viral vector.

[0067] As used herein, an “uptake modulating fragment,” UMF, means a series of nucleotides which mediate the uptake of a linked DNA fragment into a cell. UMFs can be readily identified using known UMFs as a target sequence or target motif with the computer-based systems described below. The presence and activity of a UMF can be confirmed by attaching the suspected UMF to a marker sequence. The resulting nucleic acid molecule is then incubated with an appropriate host under appropriate conditions and the uptake of the marker sequence is determined. As described above, a UMF will increase the frequency of uptake of a linked marker sequence.

[0068] Each of the above terms is meant to encompass all that is described for each, unless the context dictates otherwise.

[0069] 4.2 Nucleic Acids of the Invention

[0070] Nucleotide sequences of the invention are set forth in the Sequence Listing.

[0071] The isolated polynucleotides of the invention include a polynucleotide comprising the nucleotide sequences of SEQ ID NO: 1-178; a polynucleotide encoding any one of the peptide sequences of SEQ ID NO:1-178; and a polynucleotide comprising the nucleotide sequence encoding the mature protein coding sequence of the polynucleotides of any one of SEQ ID NO: 1-178. The polynucleotides of the present invention also include, but are not limited to, a polynucleotide that hybridizes under stringent conditions to (a) the complement of any of the nucleotides sequences of SEQ ID NO: 1-178; (b) nucleotide sequences encoding any one of the amino acid sequences set forth in the Sequence Listing; (c) a polynucleotide which is an allelic variant of any polynucleotide recited above; (d) a polynucleotide which encodes a species homolog of any of the proteins recited above; or (e) a polynucleotide that encodes a polypeptide comprising a specific domain or truncation of the polypeptides of SEQ ID NO: 1-178. Domains of interest may depend on the nature of the encoded polypeptide; e.g., domains in receptor-like polypeptides include ligand-binding, extracellular, transmembrane, or cytoplasmic domains, or combinations thereof; domains in immunoglobulin-like proteins include the variable immunoglobulin-like domains; domains in enzyme-like polypeptides include catalytic and substrate binding domains; and domains in ligand polypeptides include receptor-binding domains.

[0072] The polynucleotides of the invention include naturally occurring or wholly or partially synthetic DNA, e.g., cDNA and genomic DNA, and RNA, e.g., mRNA. The polynucleotides may include all of the coding region of the cDNA or may represent a portion of the coding region of the cDNA.

[0073] The present invention also provides genes corresponding to the cDNA sequences disclosed herein. The corresponding genes can be isolated in accordance with known methods using the sequence information disclosed herein. Such methods include the preparation of probes or primers from the disclosed sequence information for identification and/or amplification of genes in appropriate genomic libraries or other sources of genomic materials. Further 5′ and 3′ sequence can be obtained using methods known in the art. For example, full length cDNA or genomic DNA that corresponds to any of the polynucleotides of SEQ ID NO: 1-178 can be obtained by screening appropriate cDNA or genomic DNA libraries under suitable hybridization conditions using any of the polynucleotides of SEQ ID NO: 1-178 or a portion thereof as a probe. Alternatively, the polynucleotides of SEQ ID NO: 1-178 may be used as the basis for suitable primer(s) that allow identification and/or amplification of genes in appropriate genomic DNA or cDNA libraries.

[0074] The nucleic acid sequences of the invention can be assembled from ESTs and sequences (including cDNA and genomic sequences) obtained from one or more public databases, such as dbEST, gbpri, and UniGene. The EST sequences can provide identifying sequence information, representative fragment or segment information, or novel segment information for the full-length gene.

[0075] The polynucleotides of the invention also provide polynucleotides including nucleotide sequences that are substantially equivalent to the polynucleotides recited above. Polynucleotides according to the invention can have, e.g., at least about 65%, at least about 70%, at least about 75%, at least about 80%, more typically at least about 90%, and even more typically at least about 95%, sequence identity to a polynucleotide recited above.

[0076] Included within the scope of the nucleic acid sequences of the invention are nucleic acid sequence fragments that hybridize under stringent conditions to any of the nucleotide sequences of SEQ ID NO: 1-178, or complements thereof, which fragment is greater than about 5 nucleotides, preferably 7 nucleotides, more preferably greater than 9 nucleotides and most preferably greater than 17 nucleotides. Fragments of, e.g. 15, 17, or 20 nucleotides or more that are selective for (i.e. specifically hybridize to any one of the polynucleotides of the invention) are contemplated. Probes capable of specifically hybridizing to a polynucleotide can differentiate polynucleotide sequences of the invention from other polynucleotide sequences in the same family of genes or can differentiate human genes from genes of other species, and are preferably based on unique nucleotide sequences.

[0077] The sequences falling within the scope of the present invention are not limited to these specific sequences, but also include allelic and species variations thereof. Allelic and species variations can be routinely determined by comparing the sequence provided in SEQ ID NO: 1-178, a representative fragment thereof, or a nucleotide sequence at least 90% identical, preferably 95% identical, to SEQ ID NOs: 1-178 with a sequence from another isolate of the same species. Furthermore, to accommodate codon variability, the invention includes nucleic acid molecules coding for the same amino acid sequences as do the specific ORFs disclosed herein. In other words, in the coding region of an ORF, substitution of one codon for another codon that encodes the same amino acid is expressly contemplated.

[0078] The nearest neighbor or homology result for the nucleic acids of the present invention, including SEQ ID NOs: 1-178, can be obtained by searching a database using an algorithm or a program. Preferably, a BLAST which stands for Basic Local Alignment Search Tool is used to search for local sequence alignments (Altshul, S. F. J. Mol. Evol. 36 290-300 (1993) and Altschul S. F. et al. J. Mol. Biol. 21:403-410 (1990)). Alternatively a FASTA version 3 search against Genpept, using Fastxy algorithm.

[0079] Species homologs (or orthologs) of the disclosed polynucleotides and proteins are also provided by the present invention. Species homologs may be isolated and identified by making suitable probes or primers from the sequences provided herein and screening a suitable nucleic acid source from the desired species.

[0080] The invention also encompasses allelic variants of the disclosed polynucleotides or proteins; that is, naturally-occurring alternative forms of the isolated polynucleotide which also encode proteins which are identical, homologous or related to that encoded by the polynucleotides.

[0081] The nucleic acid sequences of the invention are further directed to sequences which encode variants of the described nucleic acids. These amino acid sequence variants may be prepared by methods known in the art by introducing appropriate nucleotide changes into a native or variant polynucleotide. There are two variables in the construction of amino acid sequence variants: the location of the mutation and the nature of the mutation. Nucleic acids encoding the amino acid sequence variants are preferably constructed by mutating the polynucleotide to encode an amino acid sequence that does not occur in nature. These nucleic acid alterations can be made at sites that differ in the nucleic acids from different species (variable positions) or in highly conserved regions (constant regions). Sites at such locations will typically be modified in series, e.g., by substituting first with conservative choices (e.g., hydrophobic amino acid to a different hydrophobic amino acid) and then with more distant choices (e.g., hydrophobic amino acid to a charged amino acid), and then deletions or insertions may be made at the target site. Amino acid sequence deletions generally range from about 1 to 30 residues, preferably about 1 to 10 residues, and are typically contiguous. Amino acid insertions include amino- and/or carboxyl-terminal fusions ranging in length from one to one hundred or more residues, as well as intrasequence insertions of single or multiple amino acid residues. Intrasequence insertions may range generally from about 1 to 10 amino residues, preferably from 1 to 5 residues. Examples of terminal insertions include the heterologous signal sequences necessary for secretion or for intracellular targeting in different host cells and sequences such as FLAG or poly-histidine sequences useful for purifying the expressed protein.

[0082] In a preferred method, polynucleotides encoding the novel amino acid sequences are changed via site-directed mutagenesis. This method uses oligonucleotide sequences to alter a polynucleotide to encode the desired amino acid variant, as well as sufficient adjacent nucleotides on both sides of the changed amino acid to form a stable duplex on either side of the site of being changed. In general, the techniques of site-directed mutagenesis are well known to those of skill in the art and this technique is exemplified by publications such as, Edelman et al., DNA 2:183 (1983). A versatile and efficient method for producing site-specific changes in a polynucleotide sequence was published by Zoller and Smith, Nucleic Acids Res. 10:6487-6500 (1982). PCR may also be used to create amino acid sequence variants of the novel nucleic acids. When small amounts of template DNA are used as starting material, primer(s) that differs slightly in sequence from the corresponding region in the template DNA can generate the desired amino acid variant. PCR amplification results in a population of product DNA fragments that differ from the polynucleotide template encoding the polypeptide at the position specified by the primer. The product DNA fragments replace the corresponding region in the plasmid and this gives a polynucleotide encoding the desired amino acid variant.

[0083] A further technique for generating amino acid variants is the cassette mutagenesis technique described in Wells et al., Gene 34:315 (1985); and other mutagenesis techniques well known in the art, such as, for example, the techniques in Sambrook et al., supra, and Current Protocols in Molecular Biology, Ausubel et al. Due to the inherent degeneracy of the genetic code, other DNA sequences which encode substantially the same or a functionally equivalent amino acid sequence may be used in the practice of the invention for the cloning and expression of these novel nucleic acids. Such DNA sequences include those which are capable of hybridizing to the appropriate novel nucleic acid sequence under stringent conditions.

[0084] Polynucleotides encoding preferred polypeptide truncations of the invention can be used to generate polynucleotides encoding chimeric or fusion proteins comprising one or more domains of the invention and heterologous protein sequences.

[0085] The polynucleotides of the invention additionally include the complement of any of the polynucleotides recited above. The polynucleotide can be DNA (genomic, cDNA, amplified, or synthetic) or RNA. Methods and algorithms for obtaining such polynucleotides are well known to those of skill in the art and can include, for example, methods for determining hybridization conditions that can routinely isolate polynucleotides of the desired sequence identities.

[0086] In accordance with the invention, polynucleotide sequences comprising the mature protein coding sequences corresponding to any one of SEQ ID NO: 1-178, or functional equivalents thereof, may be used to generate recombinant DNA molecules that direct the expression of that nucleic acid, or a functional equivalent thereof, in appropriate host cells. Also included are the cDNA inserts of any of the clones identified herein.

[0087] A polynucleotide according to the invention can be joined to any of a variety of other nucleotide sequences by well-established recombinant DNA techniques (see Sambrook J et al. (1989) Molecular Cloning: A Laboratory Manual, Cold Spring Harbor Laboratory, New York). Useful nucleotide sequences for joining to polynucleotides include an assortment of vectors, e.g., plasmids, cosmids, lambda phage derivatives, phagemids, and the like, that are well known in the art. Accordingly, the invention also provides a vector including a polynucleotide of the invention and a host cell containing the polynucleotide. In general, the vector contains an origin of replication functional in at least one organism, convenient restriction endonuclease sites, and a selectable marker for the host cell. Vectors according to the invention include expression vectors, replication vectors, probe generation vectors, and sequencing vectors. A host cell according to the invention can be a prokaryotic or eukaryotic cell and can be a unicellular organism or part of a multicellular organism.

[0088] The present invention further provides recombinant constructs comprising a nucleic acid having any of the nucleotide sequences of SEQ ID NOs: 1-178 or a fragment thereof or any other polynucleotides of the invention. In one embodiment, the recombinant constructs of the present invention comprise a vector, such as a plasmid or viral vector, into which a nucleic acid having any of the nucleotide sequences of SEQ ID NOs: 1-178 or a fragment thereof is inserted, in a forward or reverse orientation. In the case of a vector comprising one of the ORFs of the present invention, the vector may further comprise regulatory sequences, including for example, a promoter, operably linked to the ORF. Large numbers of suitable vectors and promoters are known to those of skill in the art and are commercially available for generating the recombinant constructs of the present invention. The following vectors are provided by way of example. Bacterial: pBs, phagescript, PsiX174, pBluescript SK, pBs KS, pNH8a, pNH16a, pNH18a, pNH46a (Stratagene); pTrc99A, pKK223-3, pKK233-3, pDR540, pRIT5 (Pharmacia). Eukaryotic: pWLneo, pSV2cat, pOG44, PXTI, pSG (Stratagene) pSVK3, pBPV, pMSG, pSVL (Pharmacia).

[0089] The isolated polynucleotide of the invention may be operably linked to an expression control sequence such as the pMT2 or pED expression vectors disclosed in Kaufman et al., Nucleic Acids Res. 19, 4485-4490 (1991), in order to produce the protein recombinantly. Many suitable expression control sequences are known in the art. General methods of expressing recombinant proteins are also known and are exemplified in R. Kaufman, Methods in Enzymology 185, 537-566 (1990). As defined herein “operably linked” means that the isolated polynucleotide of the invention and an expression control sequence are situated within a vector or cell in such a way that the protein is expressed by a host cell which has been transformed (transfected) with the ligated polynucleotide/expression control sequence.

[0090] Promoter regions can be selected from any desired gene using CAT (chloramphenicol transferase) vectors or other vectors with selectable markers. Two appropriate vectors are pKK232-8 and pCM7. Particular named bacterial promoters include lacI, lacZ, T3, T7, gpt, lambda PR, and trc. Eukaryotic promoters include CMV immediate early, HSV thymidine kinase, early and late SV40, LTRs from retrovirus, and mouse metallothionein-I. Selection of the appropriate vector and promoter is well within the level of ordinary skill in the art. Generally, recombinant expression vectors will include origins of replication and selectable markers permitting transformation of the host cell, e.g., the ampicillin resistance gene of E. coli and S. cerevisiae TRP1 gene, and a promoter derived from a highly-expressed gene to direct transcription of a downstream structural sequence. Such promoters can be derived from operons encoding glycolytic enzymes such as 3-phosphoglycerate kinase (PGK), a-factor, acid phosphatase, or heat shock proteins, among others. The heterologous structural sequence is assembled in appropriate phase with translation initiation and termination sequences, and preferably, a leader sequence capable of directing secretion of translated protein into the periplasmic space or extracellular medium. Optionally, the heterologous sequence can encode a fusion protein including an amino terminal identification peptide imparting desired characteristics, e.g., stabilization or simplified purification of expressed recombinant product. Useful expression vectors for bacterial use are constructed by inserting a structural DNA sequence encoding a desired protein together with suitable translation initiation and termination signals in operable reading phase with a functional promoter. The vector will comprise one or more phenotypic selectable markers and an origin of replication to ensure maintenance of the vector and to, if desirable, provide amplification within the host. Suitable prokaryotic hosts for transformation include E. coli, Bacillus subtilis, Salmonella typhimurium and various species within the genera Pseudomonas, Streptomyces, and Staphylococcus, although others may also be employed as a matter of choice.

[0091] As a representative but non-limiting example, useful expression vectors for bacterial use can comprise a selectable marker and bacterial origin of replication derived from commercially available plasmids comprising genetic elements of the well known cloning vector pBR322 (ATCC 37017). Such commercial vectors include, for example, pKK223-3 (Pharmacia Fine Chemicals, Uppsala, Sweden) and GEM 1 (Promega Biotech, Madison, Wis., USA). These pBR322 “backbone” sections are combined with an appropriate promoter and the structural sequence to be expressed. Following transformation of a suitable host strain and growth of the host strain to an appropriate cell density, the selected promoter is induced or derepressed by appropriate means (e.g., temperature shift or chemical induction) and cells are cultured for an additional period. Cells are typically harvested by centrifugation, disrupted by physical or chemical means, and the resulting crude extract retained for further purification.

[0092] Polynucleotides of the invention can also be used to induce immune responses. For example, as described in Fan et al., Nat. Biotech. 17:870-872 (1999), incorporated herein by reference, nucleic acid sequences encoding a polypeptide may be used to generate antibodies against the encoded polypeptide following topical administration of naked plasmid DNA or following injection, and preferably intramuscular injection of the DNA. The nucleic acid sequences are preferably inserted in a recombinant expression vector and may be in the form of naked DNA.

[0093] 4.3 Hosts

[0094] The present invention further provides host cells genetically engineered to contain the polynucleotides of the invention. For example, such host cells may contain nucleic acids of the invention introduced into the host cell using known transformation, transfection or infection methods. The present invention still further provides host cells genetically engineered to express the polynucleotides of the invention, wherein such polynucleotides are in operative association with a regulatory sequence heterologous to the host cell which drives expression of the polynucleotides in the cell.

[0095] Knowledge of nucleic acid sequences allows for modification of cells to permit, or increase, expression of endogenous polypeptide. Cells can be modified (e.g., by homologous recombination) to provide increased polypeptide expression by replacing, in whole or in part, the naturally occurring promoter with all or part of a heterologous promoter so that the cells express the polypeptide at higher levels. The heterologous promoter is inserted in such a manner that it is operatively linked to the encoding sequences. See, for example, PCT International Publication No. WO94/12650, PCT International Publication No. WO92/20808, and PCT International Publication No. WO91/09955. It is also contemplated that, in addition to heterologous promoter DNA, amplifiable marker DNA (e.g., ada, dhfr, and the multifunctional CAD gene which encodes carbamyl phosphate synthase, aspartate transcarbamylase, and dihydroorotase) and/or intron DNA may be inserted along with the heterologous promoter DNA. If linked to the coding sequence, amplification of the marker DNA by standard selection methods results in co-amplification of the desired protein coding sequences in the cells.

[0096] The host cell can be a higher eukaryotic host cell, such as a mammalian cell, a lower eukaryotic host cell, such as a yeast cell, or the host cell can be a prokaryotic cell, such as a bacterial cell. Introduction of the recombinant construct into the host cell can be effected by calcium phosphate transfection, DEAE, dextran mediated transfection, or electroporation (Davis, L. et al., Basic Methods in Molecular Biology (1986)). The host cells containing one of the polynucleotides of the invention, can be used in conventional manners to produce the gene product encoded by the isolated fragment (in the case of an ORF) or can be used to produce a heterologous protein under the control of the EMF.

[0097] Any host/vector system can be used to express one or more of the ORFs of the present invention. These include, but are not limited to, eukaryotic hosts such as HeLa cells, Cv-1 cell, COS cells, 293 cells, and Sf9 cells, as well as prokaryotic host such as E. coli and B. subtilis. The most preferred cells are those which do not normally express the particular polypeptide or protein or which expresses the polypeptide or protein at low natural level. Mature proteins can be expressed in mammalian cells, yeast, bacteria, or other cells under the control of appropriate promoters. Cell-free translation systems can also be employed to produce such proteins using RNAs derived from the DNA constructs of the present invention. Appropriate cloning and expression vectors for use with prokaryotic and eukaryotic hosts are described by Sambrook, et al., in Molecular Cloning: A Laboratory Manual, Second Edition, Cold Spring Harbor, N.Y. (1989), the disclosure of which is hereby incorporated by reference.

[0098] Various mammalian cell culture systems can also be employed to express recombinant protein. Examples of mammalian expression systems include the COS-7 lines of monkey kidney fibroblasts, described by Gluzman, Cell 23:175 (1981). Other cell lines capable of expressing a compatible vector are, for example, the C127, monkey COS cells, Chinese Hamster Ovary (CHO) cells, human kidney 293 cells, human epidermal A431 cells, human Colo205 cells, 3T3 cells, CV-1 cells, other transformed primate cell lines, normal diploid cells, cell strains derived from in vitro culture of primary tissue, primary explants, HeLa cells, mouse L cells, BHK, HL-60, U937, HaK or Jurkat cells. Mammalian expression vectors will comprise an origin of replication, a suitable promoter and also any necessary ribosome binding sites, polyadenylation site, splice donor and acceptor sites, transcriptional termination sequences, and 5′ flanking nontranscribed sequences. DNA sequences derived from the SV40 viral genome, for example, SV40 origin, early promoter, enhancer, splice, and polyadenylation sites may be used to provide the required nontranscribed genetic elements. Recombinant polypeptides and proteins produced in bacterial culture are usually isolated by initial extraction from cell pellets, followed by one or more salting-out, aqueous ion exchange or size exclusion chromatography steps. Protein refolding steps can be used, as necessary, in completing configuration of the mature protein. Finally, high performance liquid chromatography (HPLC) can be employed for final purification steps. Microbial cells employed in expression of proteins can be disrupted by any convenient method, including freeze-thaw cycling, sonication, mechanical disruption, or use of cell lysing agents.

[0099] Alternatively, it may be possible to produce the protein in lower eukaryotes such as yeast or insects or in prokaryotes such as bacteria. Potentially suitable yeast strains include Saccharomyces cerevisiae, Schizosaccharomyces pombe, Kluyveromyces strains, Candida, or any yeast strain capable of expressing heterologous proteins. Potentially suitable bacterial strains include Escherichia coli, Bacillus subtilis, Salmonella typhimurium, or any bacterial strain capable of expressing heterologous proteins. If the protein is made in yeast or bacteria, it may be necessary to modify the protein produced therein, for example by phosphorylation or glycosylation of the appropriate sites, in order to obtain the functional protein. Such covalent attachments may be accomplished using known chemical or enzymatic methods.

[0100] In another embodiment of the present invention, cells and tissues may be engineered to express an endogenous gene comprising the polynucleotides of the invention under the control of inducible regulatory elements, in which case the regulatory sequences of the endogenous gene may be replaced by homologous recombination. As described herein, gene targeting can be used to replace a gene's existing regulatory region with a regulatory sequence isolated from a different gene or a novel regulatory sequence synthesized by genetic engineering methods. Such regulatory sequences may be comprised of promoters, enhancers, scaffold-attachment regions, negative regulatory elements, transcriptional initiation sites, regulatory protein binding sites or combinations of said sequences. Alternatively, sequences which affect the structure or stability of the RNA or protein produced may be replaced, removed, added, or otherwise modified by targeting. These sequence include polyadenylation signals, mRNA stability elements, splice sites, leader sequences for enhancing or modifying transport or secretion properties of the protein, or other sequences which alter or improve the function or stability of protein or RNA molecules.

[0101] The targeting event may be a simple insertion of the regulatory sequence, placing the gene under the control of the new regulatory sequence, e.g., inserting a new promoter or enhancer or both upstream of a gene. Alternatively, the targeting event may be a simple deletion of a regulatory element, such as the deletion of a tissue-specific negative regulatory element. Alternatively, the targeting event may replace an existing element; for example, a tissue-specific enhancer can be replaced by an enhancer that has broader or different cell-type specificity than the naturally occurring elements. Here, the naturally occurring sequences are deleted and new sequences are added. In all cases, the identification of the targeting event may be facilitated by the use of one or more selectable marker genes that are contiguous with the targeting DNA, allowing for the selection of cells in which the exogenous DNA has integrated into the host cell genome. The identification of the targeting event may also be facilitated by the use of one or more marker genes exhibiting the property of negative selection, such that the negatively selectable marker is linked to the exogenous DNA, but configured such that the negatively selectable marker flanks the targeting sequence, and such that a correct homologous recombination event with sequences in the host cell genome does not result in the stable integration of the negatively selectable marker. Markers useful for this purpose include the Herpes Simplex Virus thymidine kinase (TK) gene or the bacterial xanthine-guanine phosphoribosyl-transferase (gpt) gene.

[0102] The gene targeting or gene activation techniques which can be used in accordance with this aspect of the invention are more particularly described in U.S. Pat. No. 5,272,071 to Chappel; U.S. Pat. No. 5,578,461 to Sherwin et al.; International Application No. PCT/US92/09627 (WO93/09222) by Selden et al.; and International Application No. PCT/US90/06436 (WO91/06667) by Skoultchi et al., each of which is incorporated by reference herein in its entirety.

[0103] 4.4 Polypeptides of the Invention

[0104] The isolated polypeptides of the invention include, but are not limited to, a polypeptide comprising: the amino acid sequences set forth as any one of SEQ ID NO: 1-178 or an amino acid sequence encoded by any one of the nucleotide sequences SEQ ID NOs: 1-178 or the corresponding full length or mature protein. Polypeptides of the invention also include polypeptides preferably with biological or immunological activity that are encoded by: (a) a polynucleotide having any one of the nucleotide sequences set forth in SEQ ID NOs: 1-178 or (b) polynucleotides encoding any one of the amino acid sequences set forth as SEQ ID NO: 1-178 or (c) polynucleotides that hybridize to the complement of the polynucleotides of either (a) or (b) under stringent hybridization conditions. The invention also provides biologically active or immunologically active variants of any of the amino acid sequences set forth as SEQ ID NO: 1-178 or the corresponding fill length or mature protein; and “substantial equivalents” thereof (e.g., with at least about 65%, at least about 70%, at least about 75%, at least about 80%, at least about 85%, at least about 90%, typically at least about 95%, more typically at least about 98%, or most typically at least about 99% amino acid identity) that retain biological activity. Polypeptides encoded by allelic variants may have a similar, increased, or decreased activity compared to polypeptides comprising SEQ ID NO: 1-178.

[0105] Fragments of the proteins of the present invention which are capable of exhibiting biological activity are also encompassed by the present invention. Fragments of the protein may be in linear form or they may be cyclized using known methods, for example, as described in H. U. Saragovi, et al., Bio/Technology 10, 773-778 (1992) and in R. S. McDowell, et al., J. Amer. Chem. Soc. 114, 9245-9253 (1992), both of which are incorporated herein by reference. Such fragments may be fused to carrier molecules such as immunoglobulins for many purposes, including increasing the valency of protein binding sites.

[0106] The present invention also provides both full-length and mature forms (for example, without a signal sequence or precursor sequence) of the disclosed proteins. The protein coding sequence is identified in the sequence listing by translation of the disclosed nucleotide sequences. The mature form of such protein may be obtained by expression of a full-length polynucleotide in a suitable mammalian cell or other host cell. The sequence of the mature form of the protein is also determinable from the amino acid sequence of the full-length form. Where proteins of the present invention are membrane bound, soluble forms of the proteins are also provided. In such forms, part or all of the regions causing the proteins to be membrane bound are deleted so that the proteins are fully secreted from the cell in which it is expressed.

[0107] Protein compositions of the present invention may further comprise an acceptable carrier, such as a hydrophilic, e.g., pharmaceutically acceptable, carrier.

[0108] The present invention further provides isolated polypeptides encoded by the nucleic acid fragments of the present invention or by degenerate variants of the nucleic acid fragments of the present invention. By “degenerate variant” is intended nucleotide fragments which differ from a nucleic acid fragment of the present invention (e.g., an ORF) by nucleotide sequence but, due to the degeneracy of the genetic code, encode an identical polypeptide sequence. Preferred nucleic acid fragments of the present invention are the ORFs that encode proteins.

[0109] A variety of methodologies known in the art can be utilized to obtain any one of the isolated polypeptides or proteins of the present invention. At the simplest level, the amino acid sequence can be synthesized using commercially available peptide synthesizers. The synthetically-constructed protein sequences, by virtue of sharing primary, secondary or tertiary structural and/or conformational characteristics with proteins may possess biological properties in common therewith, including protein activity. This technique is particularly useful in producing small peptides and fragments of larger polypeptides. Fragments are useful, for example, in generating antibodies against the native polypeptide. Thus, they may be employed as biologically active or immunological substitutes for natural, purified proteins in screening of therapeutic compounds and in immunological processes for the development of antibodies.

[0110] The polypeptides and proteins of the present invention can alternatively be purified from cells which have been altered to express the desired polypeptide or protein. As used herein, a cell is said to be altered to express a desired polypeptide or protein when the cell, through genetic manipulation, is made to produce a polypeptide or protein which it normally does not produce or which the cell normally produces at a lower level. One skilled in the art can readily adapt procedures for introducing and expressing either recombinant or synthetic sequences into eukaryotic or prokaryotic cells in order to generate a cell which produces one of the polypeptides or proteins of the present invention.

[0111] The invention also relates to methods for producing a polypeptide comprising growing a culture of host cells of the invention in a suitable culture medium, and purifying the protein from the cells or the culture in which the cells are grown. For example, the methods of the invention include a process for producing a polypeptide in which a host cell containing a suitable expression vector that includes a polynucleotide of the invention is cultured under conditions that allow expression of the encoded polypeptide. The polypeptide can be recovered from the culture, conveniently from the culture medium, or from a lysate prepared from the host cells and further purified. Preferred embodiments include those in which the protein produced by such process is a full length or mature form of the protein.

[0112] In an alternative method, the polypeptide or protein is purified from bacterial cells which naturally produce the polypeptide or protein. One skilled in the art can readily follow known methods for isolating polypeptides and proteins in order to obtain one of the isolated polypeptides or proteins of the present invention. These include, but are not limited to, immunochromatography, HPLC, size-exclusion chromatography, ion-exchange chromatography, and immuno-affinity chromatography. See, e.g., Scopes, Protein Purification: Principles and Practice, Springer-Verlag (1994); Sambrook, et al., in Molecular Cloning: A Laboratory Manual; Ausubel et al., Current Protocols in Molecular Biology. Polypeptide fragments that retain biological/immunological activity include fragments comprising greater than about 100 amino acids, or greater than about 200 amino acids, and fragments that encode specific protein domains.

[0113] The purified polypeptides can be used in in vitro binding assays which are well known in the art to identify molecules which bind to the polypeptides. These molecules include but are not limited to, for e.g., small molecules, molecules from combinatorial libraries, antibodies or other proteins. The molecules identified in the binding assay are then tested for antagonist or agonist activity in in vivo tissue culture or animal models that are well known in the art. In brief, the molecules are titrated into a plurality of cell cultures or animals and then tested for either cell/animal death or prolonged survival of the animal/cells.

[0114] In addition, the peptides of the invention or molecules capable of binding to the peptides may be complexed with toxins, e.g., ricin or cholera, or with other compounds that are toxic to cells. The toxin-binding molecule complex is then targeted to a tumor or other cell by the specificity of the binding molecule for SEQ ID NO: 1-178.

[0115] The protein of the invention may also be expressed as a product of transgenic animals, e.g., as a component of the milk of transgenic cows, goats, pigs, or sheep which are characterized by somatic or germ cells containing a nucleotide sequence encoding the protein.

[0116] The proteins provided herein also include proteins characterized by amino acid sequences similar to those of purified proteins but into which modification are naturally provided or deliberately engineered. For example, modifications, in the peptide or DNA sequence, can be made by those skilled in the art using known techniques. Modifications of interest in the protein sequences may include the alteration, substitution, replacement, insertion or deletion of a selected amino acid residue in the coding sequence. For example, one or more of the cysteine residues may be deleted or replaced with another amino acid to alter the conformation of the molecule. Techniques for such alteration, substitution, replacement, insertion or deletion are well known to those skilled in the art (see, e.g., U.S. Pat. No. 4,518,584). Preferably, such alteration, substitution, replacement, insertion or deletion retains the desired activity of the protein. Regions of the protein that are important for the protein function can be determined by various methods known in the art including the alanine-scanning method which involved systematic substitution of single or strings of amino acids with alanine, followed by testing the resulting alanine-containing variant for biological activity. This type of analysis determines the importance of the substituted amino acid(s) in biological activity. Regions of the protein that are important for protein function may be determined by the eMATRIX program.

[0117] Other fragments and derivatives of the sequences of proteins which would be expected to retain protein activity in whole or in part and are useful for screening or other immunological methodologies may also be easily made by those skilled in the art given the disclosures herein. Such modifications are encompassed by the present invention.

[0118] The protein may also be produced by operably linking the isolated polynucleotide of the invention to suitable control sequences in one or more insect expression vectors, and employing an insect expression system. Materials and methods for baculovirus/insect cell expression systems are commercially available in kit form from, e.g., Invitrogen, San Diego, Calif., U.S.A. (the MaxBat™ kit), and such methods are well known in the art, as described in Summers and Smith, Texas Agricultural Experiment Station Bulletin No. 1555 (1987), incorporated herein by reference. As used herein, an insect cell capable of expressing a polynucleotide of the present invention is “transformed.”

[0119] The protein of the invention may be prepared by culturing transformed host cells under culture conditions suitable to express the recombinant protein. The resulting expressed protein may then be purified from such culture (i.e., from culture medium or cell extracts) using known purification processes, such as gel filtration and ion exchange chromatography. The purification of the protein may also include an affinity column containing agents which will bind to the protein; one or more column steps over such affinity resins as concanavalin A-agarose, heparin-toyopearl™ or Cibacrom blue 3GA Sepharose™; one or more steps involving hydrophobic interaction chromatography using such resins as phenyl ether, butyl ether, or propyl ether; or immunoaffinity chromatography.

[0120] Alternatively, the protein of the invention may also be expressed in a form which will facilitate purification. For example, it may be expressed as a fusion protein, such as those of maltose binding protein (MBP), glutathione-S-transferase (GST) or thioredoxin (TRX), or as a His tag. Kits for expression and purification of such fusion proteins are commercially available from New England BioLab (Beverly, Mass.), Pharmacia (Piscataway, N.J.) and Invitrogen, respectively. The protein can also be tagged with an epitope and subsequently purified by using a specific antibody directed to such epitope. One such epitope (“FLAG®”) is commercially available from Kodak (New Haven, Conn.).

[0121] Finally, one or more reverse-phase high performance liquid chromatography (RP-HPLC) steps employing hydrophobic RP-HPLC media, e.g., silica gel having pendant methyl or other aliphatic groups, can be employed to further purify the protein. Some or all of the foregoing purification steps, in various combinations, can also be employed to provide a substantially homogeneous isolated recombinant protein. The protein thus purified is substantially free of other mammalian proteins and is defined in accordance with the present invention as an “isolated protein.”

[0122] The polypeptides of the invention include analogs (variants). This embraces fragments, as well as peptides in which one or more amino acids has been deleted, inserted, or substituted. Also, analogs of the polypeptides of the invention embrace fusions of the polypeptides or modifications of the polypeptides of the invention, wherein the polypeptide or analog is fused to another moiety or moieties, e.g., targeting moiety or another therapeutic agent. Such analogs may exhibit improved properties such as activity and/or stability. Examples of moieties which may be fused to the polypeptide or an analog include, for example, targeting moieties which provide for the delivery of polypeptide to pancreatic cells, e.g., antibodies to pancreatic cells, antibodies to immune cells such as T-cells, monocytes, dendritic cells, granulocytes, etc., as well as receptor and ligands expressed on pancreatic or immune cells. Other moieties which may be fused to the polypeptide include therapeutic agents which are used for treatment, for example, immunosuppressive drugs such as cyclosporin, SK506, azathioprine, CD3 antibodies and steroids. Also, polypeptides may be fused to immune modulators, and other cytokines such as alpha or beta interferon.

[0123] 4.4.1 Determining Polypeptide and Polynucleotide Identity and Similarity

[0124] Preferred identity and/or similarity are designed to give the largest match between the sequences tested. Methods to determine identity and similarity are codified in computer programs including, but are not limited to, the GCG program package, including GAP (Devereux, J., et al., Nucleic Acids Research 12(1):387 (1984); Genetics Computer Group, University of Wisconsin, Madison, Wis.), BLASTP, BLASTN, BLASTX, FASTA (Altschul, S. F. et al., J. Molec. Biol. 215:403-410 (1990), PSI-BLAST (Altschul S. F. et al., Nucleic Acids Res. vol. 25, pp. 3389-3402, herein incorporated by reference), eMatrix software (Wu et al., J. Comp. Biol., Vol. 6, pp. 219-235 (1999), herein incorporated by reference), eMotif software (Nevill-Manning et al, ISMB-97, Vol. 4, pp. 202-209, herein incorporated by reference), pFam software (Sonnhammer et al., Nucleic Acids Res., Vol. 26(1), pp. 320-322 (1998), herein incorporated by reference) and the Kyte-Doolittle hydrophobocity prediction algorithm (J. Mol Biol, 157, pp. 105-31 (1982), incorporated herein by reference). The BLAST programs are publicly available from the National Center for Biotechnology Information (NCBI) and other sources (BLAST Manual, Altschul, S., et al. NCB NLM NIH Bethesda, Md. 20894; Altschul, S., et al., J. Mol. Biol. 215:403-410 (1990).

[0125] 4.5 Gene Therapy

[0126] Mutations in the polynucleotides of the invention gene may result in loss of normal function of the encoded protein. The invention thus provides gene therapy to restore normal activity of the polypeptides of the invention; or to treat disease states involving polypeptides of the invention. Delivery of a functional gene encoding polypeptides of the invention to appropriate cells is effected ex vivo, in situ, or in vivo by use of vectors, and more particularly viral vectors (e.g., adenovirus, adeno-associated virus, or a retrovirus), or ex vivo by use of physical DNA transfer methods (e.g., liposomes or chemical treatments). See, for example, Anderson, Nature, supplement to vol. 392, no. 6679, pp.25-20 (1998). For additional reviews of gene therapy technology see Friedmann, Science, 244: 1275-1281 (1989); Verma, Scientific American: 68-84 (1990); and Miller, Nature, 357: 455-460 (1992). Introduction of any one of the nucleotides of the present invention or a gene encoding the polypeptides of the present invention can also be accomplished with extrachromosomal substrates (transient expression) or artificial chromosomes (stable expression). Cells may also be cultured ex vivo in the presence of proteins of the present invention in order to proliferate or to produce a desired effect on or activity in such cells. Treated cells can then be introduced in vivo for therapeutic purposes. Alternatively, it is contemplated that in other human disease states, preventing the expression of or inhibiting the activity of polypeptides of the invention will be useful in treating the disease states. It is contemplated that antisense therapy or gene therapy could be applied to negatively regulate the expression of polypeptides of the invention.

[0127] Other methods inhibiting expression of a protein include the introduction of antisense molecules to the nucleic acids of the present invention, their complements, or their translated RNA sequences, by methods known in the art. Further, the polypeptides of the present invention can be inhibited by using targeted deletion methods, or the insertion of a negative regulatory element such as a silencer, which is tissue specific.

[0128] The present invention still further provides cells genetically engineered in vivo to express the polynucleotides of the invention, wherein such polynucleotides are in operative association with a regulatory sequence heterologous to the host cell which drives expression of the polynucleotides in the cell. These methods can be used to increase or decrease the expression of the polynucleotides of the present invention.

[0129] Knowledge of DNA sequences provided by the invention allows for modification of cells to permit, increase, or decrease, expression of endogenous polypeptide. Cells can be modified (e.g., by homologous recombination) to provide increased polypeptide expression by replacing, in whole or in part, the naturally occurring promoter with all or part of a heterologous promoter so that the cells express the protein at higher levels. The heterologous promoter is inserted in such a manner that it is operatively linked to the desired protein encoding sequences. See, for example, PCT International Publication No. WO 94/12650, PCT International Publication No. WO 92/20808, and PCT International Publication No. WO 91/09955. It is also contemplated that, in addition to heterologous promoter DNA, amplifiable marker DNA (e.g., ada, dhfr, and the multifunctional CAD gene which encodes carbamyl phosphate synthase, aspartate transcarbamylase, and dihydroorotase) and/or intron DNA may be inserted along with the heterologous promoter DNA. If linked to the desired protein coding sequence, amplification of the marker DNA by standard selection methods results in co-amplification of the desired protein coding sequences in the cells.

[0130] In another embodiment of the present invention, cells and tissues may be engineered to express an endogenous gene comprising the polynucleotides of the invention under the control of inducible regulatory elements, in which case the regulatory sequences of the endogenous gene may be replaced by homologous recombination. As described herein, gene targeting can be used to replace a gene's existing regulatory region with a regulatory sequence isolated from a different gene or a novel regulatory sequence synthesized by genetic engineering methods. Such regulatory sequences may be comprised of promoters, enhancers, scaffold-attachment regions, negative regulatory elements, transcriptional initiation sites, regulatory protein binding sites or combinations of said sequences. Alternatively, sequences which affect the structure or stability of the RNA or protein produced may be replaced, removed, added, or otherwise modified by targeting. These sequences include polyadenylation signals, mRNA stability elements, splice sites, leader sequences for enhancing or modifying transport or secretion properties of the protein, or other sequences which alter or improve the function or stability of protein or RNA molecules.

[0131] The targeting event may be a simple insertion of the regulatory sequence, placing the gene under the control of the new regulatory sequence, e.g., inserting a new promoter or enhancer or both upstream of a gene. Alternatively, the targeting event may be a simple deletion of a regulatory element, such as the deletion of a tissue-specific negative regulatory element. Alternatively, the targeting event may replace an existing element; for example, a tissue-specific enhancer can be replaced by an enhancer that has broader or different cell-type specificity than the naturally occurring elements. Here, the naturally occurring sequences are deleted and new sequences are added. In all cases, the identification of the targeting event may be facilitated by the use of one or more selectable marker genes that are contiguous with the targeting DNA, allowing for the selection of cells in which the exogenous DNA has integrated into the cell genome. The identification of the targeting event may also be facilitated by the use of one or more marker genes exhibiting the property of negative selection, such that the negatively selectable marker is linked to the exogenous DNA, but configured such that the negatively selectable marker flanks the targeting sequence, and such that a correct homologous recombination event with sequences in the host cell genome does not result in the stable integration of the negatively selectable marker. Markers useful for this purpose include the Herpes Simplex Virus thymidine kinase (TK) gene or the bacterial xanthine-guanine phosphoribosyl-transferase (gpt) gene.

[0132] The gene targeting or gene activation techniques which can be used in accordance with this aspect of the invention are more particularly described in U.S. Pat. No. 5,272,071 to Chappel; U.S. Pat. No. 5,578,461 to Sherwin et al.; International Application No. PCT/US92/09627 (WO93/09222) by Selden et al.; and International Application No. PCT/US90/06436 (WO91/06667) by Skoultchi et al., each of which is incorporated by reference herein in its entirety.

[0133] 4.6 Transgenic Animals

[0134] In preferred methods to determine biological functions of the polypeptides of the invention in vivo, one or more genes provided by the invention are either over expressed or inactivated in the germ line of animals using homologous recombination [Capecchi, Science 244:1288-1292 (1989)]. Animals in which the gene is over expressed, under the regulatory control of exogenous or endogenous promoter elements, are known as transgenic animals. Animals in which an endogenous gene has been inactivated by homologous recombination are referred to as “knockout” animals. Knockout animals, preferably non-human mammals, can be prepared as described in U.S. Pat. No. 5,557,032, incorporated herein by reference. Transgenic animals are useful to determine the roles polypeptides of the invention play in biological processes, and preferably in disease states. Transgenic animals are useful as model systems to identify compounds that modulate lipid metabolism. Transgenic animals, preferably non-human mammals, are produced using methods as described in U.S. Pat. No. 5,489,743 and PCT Publication No. WO94/28122, incorporated herein by reference.

[0135] Transgenic animals can be prepared wherein all or part of a promoter of the polynucleotides of the invention is either activated or inactivated to alter the level of expression of the polypeptides of the invention. Inactivation can be carried out using homologous recombination methods described above. Activation can be achieved by supplementing or even replacing the homologous promoter to provide for increased protein expression. The homologous promoter can be supplemented by insertion of one or more heterologous enhancer elements known to confer promoter activation in a particular tissue.

[0136] The polynucleotides of the present invention also make possible the development, through, e.g., homologous recombination or knock out strategies, of animals that fail to express polypeptides of the invention or that express a variant polypeptide. Such animals are useful as models for studying the in vivo activities of polypeptide as well as for studying modulators of the polypeptides of the invention.

[0137] In preferred methods to determine biological functions of the polypeptides of the invention in vivo, one or more genes provided by the invention are either over expressed or inactivated in the germ line of animals using homologous recombination [Capecchi, Science 244:1288-1292 (1989)]. Animals in which the gene is over expressed, under the regulatory control of exogenous or endogenous promoter elements, are known as transgenic animals. Animals in which an endogenous gene has been inactivated by homologous recombination are referred to as “knockout” animals. Knockout animals, preferably non-human mammals, can be prepared as described in U.S. Pat. No. 5,557,032, incorporated herein by reference. Transgenic animals are useful to determine the roles polypeptides of the invention play in biological processes, and preferably in disease states. Transgenic animals are useful as model systems to identify compounds that modulate lipid metabolism. Transgenic animals, preferably non-human mammals, are produced using methods as described in U.S. Pat. No. 5,489,743 and PCT Publication No. WO94/28122, incorporated herein by reference.

[0138] Transgenic animals can be prepared wherein all or part of the polynucleotides of the invention promoter is either activated or inactivated to alter the level of expression of the polypeptides of the invention. Inactivation can be carried out using homologous recombination methods described above. Activation can be achieved by supplementing or even replacing the homologous promoter to provide for increased protein expression. The homologous promoter can be supplemented by insertion of one or more heterologous enhancer elements known to confer promoter activation in a particular tissue.

[0139] 4.7 Uses and Biological Activity

[0140] The polynucleotides and proteins of the present invention are expected to exhibit one or more of the uses or biological activities (including those associated with assays cited herein) identified herein. Uses or activities described for proteins of the present invention may be provided by administration or use of such proteins or of polynucleotides encoding such proteins (such as, for example, in gene therapies or vectors suitable for introduction of DNA). The mechanism underlying the particular condition or pathology will dictate whether the polypeptides of the invention, the polynucleotides of the invention or modulators (activators or inhibitors) thereof would be beneficial to the subject in need of treatment. Thus, “therapeutic compositions of the invention” include compositions comprising isolated polynucleotides (including recombinant DNA molecules, cloned genes and degenerate variants thereof) or polypeptides of the invention (including full length protein, mature protein and truncations or domains thereof), or compounds and other substances that modulate the overall activity of the target gene products, either at the level of target gene/protein expression or target protein activity. Such modulators include polypeptides, analogs, (variants), including fragments and fusion proteins, antibodies and other binding proteins; chemical compounds that directly or indirectly activate or inhibit the polypeptides of the invention (identified, e.g., via drug screening assays as described herein); antisense polynucleotides and polynucleotides suitable for triple helix formation; and in particular antibodies or other binding partners that specifically recognize one or more epitopes of the polypeptides of the invention.

[0141] The polypeptides of the present invention may likewise be involved in cellular activation or in one of the other physiological pathways described herein.

[0142] 4.7.1 Research Uses and Utilities

[0143] The polynucleotides provided by the present invention can be used by the research community for various purposes. The polynucleotides can be used to express recombinant protein for analysis, characterization or therapeutic use; as markers for tissues in which the corresponding protein is preferentially expressed (either constitutively or at a particular stage of tissue differentiation or development or in disease states); as molecular weight markers on gels; as chromosome markers or tags (when labeled) to identify chromosomes or to map related gene positions; to compare with endogenous DNA sequences in patients to identify potential genetic disorders; as probes to hybridize and thus discover novel, related DNA sequences; as a source of information to derive PCR primers for genetic fingerprinting; as a probe to “subtract-out” known sequences in the process of discovering other novel polynucleotides; for selecting and making oligomers for attachment to a “gene chip” or other support, including for examination of expression patterns; to raise anti-protein antibodies using DNA immunization techniques; and as an antigen to raise anti-DNA antibodies or elicit another immune response. Where the polynucleotide encodes a protein which binds or potentially binds to another protein (such as, for example, in a receptor-ligand interaction), the polynucleotide can also be used in interaction trap assays (such as, for example, that described in Gyuris et al., Cell 75:791-803 (1993)) to identify polynucleotides encoding the other protein with which binding occurs or to identify inhibitors of the binding interaction.

[0144] The polypeptides provided by the present invention can similarly be used in assays to determine biological activity, including in a panel of multiple proteins for high-throughput screening; to raise antibodies or to elicit another immune response; as a reagent (including the labeled reagent) in assays designed to quantitatively determine levels of the protein (or its receptor) in biological fluids; as markers for tissues in which the corresponding polypeptide is preferentially expressed (either constitutively or at a particular stage of tissue differentiation or development or in a disease state); and, of course, to isolate correlative receptors or ligands. Proteins involved in these binding interactions can also be used to screen for peptide or small molecule inhibitors or agonists of the binding interaction.

[0145] Any or all of these research utilities are capable of being developed into reagent grade or kit format for commercialization as research products.

[0146] Methods for performing the uses listed above are well known to those skilled in the art. References disclosing such methods include without limitation “Molecular Cloning: A Laboratory Manual”, 2d ed., Cold Spring Harbor Laboratory Press, Sambrook, J., E. F. Fritsch and T. Maniatis eds., 1989, and “Methods in Enzymology: Guide to Molecular Cloning Techniques”, Academic Press, Berger, S. L. and A. R. Kimmel eds., 1987.

[0147] 4.7.2 Nutritional Uses

[0148] Polynucleotides and polypeptides of the present invention can also be used as nutritional sources or supplements. Such uses include without limitation use as a protein or amino acid supplement, use as a carbon source, use as a nitrogen source and use as a source of carbohydrate. In such cases the polypeptide or polynucleotide of the invention can be added to the feed of a particular organism or can be administered as a separate solid or liquid preparation, such as in the form of powder, pills, solutions, suspensions or capsules. In the case of microorganisms, the polypeptide or polynucleotide of the invention can be added to the medium in or on which the microorganism is cultured.

[0149] 4.7.3 Cytokine and Cell Proliferation/Differentiation Activity

[0150] A polypeptide of the present invention may exhibit activity relating to cytokine, cell proliferation (either inducing or inhibiting) or cell differentiation (either inducing or inhibiting) activity or may induce production of other cytokines in certain cell populations. A polynucleotide of the invention can encode a polypeptide exhibiting such attributes. Many protein factors discovered to date, including all known cytokines, have exhibited activity in one or more factor-dependent cell proliferation assays, and hence the assays serve as a convenient confirmation of cytokine activity. The activity of therapeutic compositions of the present invention is evidenced by any one of a number of routine factor dependent cell proliferation assays for cell lines including, without limitation, 32D, DA2, DA1G, T10, B9, B9/11, BaF3, MC9/G, M+(preB M+), 2E8, RB5, DA1, 123, T1165, HT2, CTLL2, TF-1, Mo7e, CMK, HUVEC, and Caco. Therapeutic compositions of the invention can be used in the following:

[0151] Assays for T-cell or thymocyte proliferation include without limitation those described in: Current Protocols in Immunology, Ed by J. E. Coligan, A. M. Kruisbeek, D. H. Margulies, E. M. Shevach, W. Strober, Pub. Greene Publishing Associates and Wiley-Interscience (Chapter 3, In Vitro assays for Mouse Lymphocyte Function 3.1-3.19; Chapter 7, Immunologic studies in Humans); Takai et al., J. Immunol. 137:3494-3500, 1986; Bertagnolli et al., J. Immunol. 145:1706-1712, 1990; Bertagnolli et al., Cellular Immunology 133:327-341, 1991; Bertagnolli, et al., I. Immunol. 149:3778-3783, 1992; Bowman et al., I. Immunol. 152:1756-1761, 1994.

[0152] Assays for cytokine production and/or proliferation of spleen cells, lymph node cells or thymocytes include, without limitation, those described in: Polyclonal T cell stimulation, Kruisbeek, A. M. and Shevach, E. M. In Current Protocols in Immunology. J. E. e.a. Coligan eds. Vol 1 pp. 3.12.1-3.12.14, John Wiley and Sons, Toronto. 1994; and Measurement of mouse and human interleukin—, Schreiber, R. D. In Current Protocols in Immunology. J. E. e.a. Coligan eds. Vol 1 pp. 6.8.1-6.8.8, John Wiley and Sons, Toronto. 1994.

[0153] Assays for proliferation and differentiation of hematopoietic and lymphopoietic cells include, without limitation, those described in: Measurement of Human and Murine Interleukin 2 and Interleukin 4, Bottomly, K., Davis, L. S. and Lipsky, P. E. In Current Protocols in Immunology. J. E. e.a. Coligan eds. Vol 1 pp. 6.3.1-6.3.12, John Wiley and Sons, Toronto. 1991; deVries et al., J. Exp. Med. 173:1205-1211, 1991; Moreau et al., Nature 336:690-692, 1988; Greenberger et al., Proc. Natl. Acad. Sci. U.S.A. 80:2931-2938, 1983; Measurement of mouse and human interleukin 6—Nordarn, R. In Current Protocols in Immunology. J. E. Coligan eds. Vol 1 pp. 6.6.1-6.6.5, John Wiley and Sons, Toronto. 1991; Smith et al., Proc. Natl. Aced. Sci. U.S.A. 83:1857-1861, 1986; Measurement of human Interleukin 11—Bennett, F., Giannotti, J., Clark, S. C. and Turner, K. J. In Current Protocols in Immunology. J. E. Coligan eds. Vol 1 pp. 6.15.1 John Wiley and Sons, Toronto. 1991; Measurement of mouse and human Interleukin 9—Ciarletta, A., Giannotti, J., Clark, S. C. and Turner, K. J. In Current Protocols in Immunology. J. E. Coligan eds. Vol 1 pp. 6.13.1, John Wiley and Sons, Toronto. 1991.

[0154] Assays for T-cell clone responses to antigens (which will identify, among others, proteins that affect APC-T cell interactions as well as direct T-cell effects by measuring proliferation and cytokine production) include, without limitation, those described in: Current Protocols in Immunology, Ed by J. E. Coligan, A. M. Kruisbeek, D. H. Margulies, E. M. Shevach, W Strober, Pub. Greene Publishing Associates and Wiley-Interscience (Chapter 3, In Vitro assays for Mouse Lymphocyte Function; Chapter 6, Cytokines and their cellular receptors; Chapter 7, Immunologic studies in Humans); Weinberger et al., Proc. Natl. Acad. Sci. USA 77:6091-6095, 1980; Weinberger et al., Eur. J. Immun. 11:405-411, 1981; Takai et al., J. Immunol. 137:3494-3500, 1986; Takai et al., J. Immunol. 140:508-512, 1988.

[0155] 4.7.4 Stem Cell Growth Factor Activity

[0156] A polypeptide of the present invention may exhibit stem cell growth factor activity and be involved in the proliferation, differentiation and survival of pluripotent and totipotent stem cells including primordial germ cells, embryonic stem cells, hematopoietic stem cells and/or germ line stem cells. Administration of the polypeptide of the invention to stem cells in vivo or ex vivo is expected to maintain and expand cell populations in a totipotential or pluripotential state which would be useful for re-engineering damaged or diseased tissues, transplantation, manufacture of bio-pharmaceuticals and the development of bio-sensors. The ability to produce large quantities of human cells has important working applications for the production of human proteins which currently must be obtained from non-human sources or donors, implantation of cells to treat diseases such as Parkinson's, Alzheimer's and other neurodegenerative diseases; tissues for grafting such as bone marrow, skin, cartilage, tendons, bone, muscle (including cardiac muscle), blood vessels, cornea, neural cells, gastrointestinal cells and others; and organs for transplantation such as kidney, liver, pancreas (including islet cells), heart and lung.

[0157] It is contemplated that multiple different exogenous growth factors and/or cytokines may be administered in combination with the polypeptide of the invention to achieve the desired effect, including any of the growth factors listed herein, other stem cell maintenance factors, and specifically including stem cell factor (SCF), leukemia inhibitory factor (LIF), Flt-3 ligand (Flt-3L), any of the interleukins, recombinant soluble IL-6 receptor fused to IL-6, macrophage inflammatory protein 1-alpha (MIP-1-alpha), G-CSF, GM-CSF, thrombopoietin (TPO), platelet factor 4 (PF-4), platelet-derived growth factor (PDGF), neural growth factors and basic fibroblast growth factor (bFGF).

[0158] Since totipotent stem cells can give rise to virtually any mature cell type, expansion of these cells in culture will facilitate the production of large quantities of mature cells. Techniques for culturing stem cells are known in the art and administration of polypeptides of the invention, optionally with other growth factors and/or cytokines, is expected to enhance the survival and proliferation of the stem cell populations. This can be accomplished by direct administration of the polypeptide of the invention to the culture medium. Alternatively, stroma cells transfected with a polynucleotide that encodes for the polypeptide of the invention can be used as a feeder layer for the stem cell populations in culture or in vivo. Stromal support cells for feeder layers may include embryonic bone marrow fibroblasts, bone marrow stromal cells, fetal liver cells, or cultured embryonic fibroblasts (see U.S. Pat. No. 5,690,926).

[0159] Stem cells themselves can be transfected with a polynucleotide of the invention to induce autocrine expression of the polypeptide of the invention. This will allow for generation of undifferentiated totipotential/pluripotential stem cell lines that are useful as is or that can then be differentiated into the desired mature cell types. These stable cell lines can also serve as a source of undifferentiated totipotential/pluripotential mRNA to create cDNA libraries and templates for polymerase chain reaction experiments. These studies would allow for the isolation and identification of differentially expressed genes in stem cell populations that regulate stem cell proliferation and/or maintenance.

[0160] Expansion and maintenance of totipotent stem cell populations will be useful in the treatment of many pathological conditions. For example, polypeptides of the present invention may be used to manipulate stem cells in culture to give rise to neuroepithelial cells that can be used to augment or replace cells damaged by illness, autoimmune disease, accidental damage or genetic disorders. The polypeptide of the invention may be useful for inducing the proliferation of neural cells and for the regeneration of nerve and brain tissue, i.e. for the treatment of central and peripheral nervous system diseases and neuropathies, as well as mechanical and traumatic disorders which involve degeneration, death or trauma to neural cells or nerve tissue. In addition, the expanded stem cell populations can also be genetically altered for gene therapy purposes and to decrease host rejection of replacement tissues after grafting or implantation.

[0161] Expression of the polypeptide of the invention and its effect on stem cells can also be manipulated to achieve controlled differentiation of the stem cells into more differentiated cell types. A broadly applicable method of obtaining pure populations of a specific differentiated cell type from undifferentiated stem cell populations involves the use of a cell-type specific promoter driving a selectable marker. The selectable marker allows only cells of the desired type to survive. For example, stem cells can be induced to differentiate into cardiomyocytes (Wobus et al., Differentiation, 48: 173-182, (1991); Klug et al., J. Clin. Invest., 98(1): 216-224, (1998)) or skeletal muscle cells (Browder, L. W. In: Principles of Tissue Engineering eds. Lanza et al., Academic Press (1997)). Alternatively, directed differentiation of stem cells can be accomplished by culturing the stem cells in the presence of a differentiation factor such as retinoic acid and an antagonist of the polypeptide of the invention which would inhibit the effects of endogenous stem cell factor activity and allow differentiation to proceed.

[0162] In vitro cultures of stem cells can be used to determine if the polypeptide of the invention exhibits stem cell growth factor activity. Stem cells are isolated from any one of various cell sources (including hematopoietic stem cells and embryonic stem cells) and cultured on a feeder layer, as described by Thompson et al. Proc. Natl. Acad. Sci, U.S.A., 92: 7844-7848 (1995), in the presence of the polypeptide of the invention alone or in combination with other growth factors or cytokines. The ability of the polypeptide of the invention to induce stem cells proliferation is determined by colony formation on semi-solid support e.g. as described by Bernstein et al., Blood, 77: 2316-2321 (1991).

[0163] 4.7.5 Hematopoiesis Regulating Activity

[0164] A polypeptide of the present invention may be involved in regulation of hematopoiesis and, consequently, in the treatment of myeloid or lymphoid cell disorders. Even marginal biological activity in support of colony forming cells or of factor-dependent cell lines indicates involvement in regulating hematopoiesis, e.g. in supporting the growth and proliferation of erythroid progenitor cells alone or in combination with other cytokines, thereby indicating utility, for example, in treating various anemias or for use in conjunction with irradiation/chemotherapy to stimulate the production of erythroid precursors and/or erythroid cells; in supporting the growth and proliferation of myeloid cells such as granulocytes and monocytes/macrophages (i.e., traditional CSF activity) useful, for example, in conjunction with chemotherapy to prevent or treat consequent myelo-suppression; in supporting the growth and proliferation of megakaryocytes and consequently of platelets thereby allowing prevention or treatment of various platelet disorders such as thrombocytopenia, and generally for use in place of or complimentary to platelet transfusions; and/or in supporting the growth and proliferation of hematopoietic stem cells which are capable of maturing to any and all of the above-mentioned hematopoietic cells and therefore find therapeutic utility in various stem cell disorders (such as those usually treated with transplantation, including, without limitation, aplastic anemia and paroxysmal nocturnal hemoglobinuria), as well as in repopulating the stem cell compartment post irradiation/chemotherapy, either in-vivo or ex-vivo (i.e., in conjunction with bone marrow transplantation or with peripheral progenitor cell transplantation homologous or heterologous)) as normal cells or genetically manipulated for gene therapy.

[0165] Therapeutic compositions of the invention can be used in the following:

[0166] Suitable assays for proliferation and differentiation of various hematopoietic lines are cited above.

[0167] Assays for embryonic stem cell differentiation (which will identify, among others, proteins that influence embryonic differentiation hematopoiesis) include, without limitation, those described in: Johansson et al. Cellular Biology 15:141-151, 1995; Keller et al., Molecular and Cellular Biology 13:473-486, 1993; McClanahan et al., Blood 81:2903-2915, 1993.

[0168] Assays for stem cell survival and differentiation (which will identify, among others, proteins that regulate lympho-hematopoiesis) include, without limitation, those described in: Methylcellulose colony forming assays, Freshney, M. G. In Culture of Hematopoietic Cells. R. I. Freshney, et al. eds. Vol pp. 265-268, Wiley-Liss, Inc., New York, N.Y. 1994; Hirayama et al., Proc. Natl. Acad. Sci. USA 89:5907-5911, 1992; Primitive hematopoietic colony forming cells with high proliferative potential, McNiece, I. K. and Briddell, R. A. In Culture of Hematopoietic Cells. R. I. Freshney, et al. eds. Vol pp. 23-39, Wiley-Liss, Inc., New York, N.Y. 1994; Neben et al., Experimental Hematology 22:353-359, 1994; Cobblestone area-forming cell assay, Ploemacher, R. E. In Culture of Hematopoietic Cells. R. I. Freshney, et al. eds. Vol pp. 1-21, Wiley-Liss, Inc., New York, N.Y. 1994; Long term bone marrow cultures in the presence of stromal cells, Spooncer, E., Dexter, M. and Allen, T. In Culture of Hematopoietic Cells. R. I. Freshney, et al. eds. Vol pp. 163-179, Wiley-Liss, Inc., New York, N.Y. 1994; Long term culture initiating cell assay, Sutherland, H. J. In Culture of Hematopoietic Cells. R. I. Freshney, et al. eds. Vol pp. 139-162, Wiley-Liss, Inc., New York, N.Y. 1994.

[0169] 4.7.6 Tissue Growth Activity

[0170] A polypeptide of the present invention also maybe involved in bone, cartilage, tendon, ligament and/or nerve tissue growth or regeneration, as well as in wound healing and tissue repair and replacement, and in healing of burns, incisions and ulcers.

[0171] A polypeptide of the present invention which induces cartilage and/or bone growth in circumstances where bone is not normally formed, has application in the healing of bone fractures and cartilage damage or defects in humans and other animals. Compositions of a polypeptide, antibody, binding partner, or other modulator of the invention may have prophylactic use in closed as well as open fracture reduction and also in the improved fixation of artificial joints. De novo bone formation induced by an osteogenic agent contributes to the repair of congenital, trauma induced, or oncologic resection induced craniofacial defects, and also is useful in cosmetic plastic surgery.

[0172] A polypeptide of this invention may also be involved in attracting bone-forming cells, stimulating growth of bone-forming cells, or inducing differentiation of progenitors of bone-forming cells. Treatment of osteoporosis, osteoarthritis, bone degenerative disorders, or periodontal disease, such as through stimulation of bone and/or cartilage repair or by blocking inflammation or processes of tissue destruction (collagenase activity, osteoclast activity, etc.) mediated by inflammatory processes may also be possible using the composition of the invention.

[0173] Another category of tissue regeneration activity that may involve the polypeptide of the present invention is tendon/ligament formation. Induction of tendon/ligament-like tissue or other tissue formation in circumstances where such tissue is not normally formed, has application in the healing of tendon or ligament tears, deformities and other tendon or ligament defects in humans and other animals. Such a preparation employing a tendon/ligament-like tissue inducing protein may have prophylactic use in preventing damage to tendon or ligament tissue, as well as use in the improved fixation of tendon or ligament to bone or other tissues, and in repairing defects to tendon or ligament tissue. De novo tendon/ligament-like tissue formation induced by a composition of the present invention contributes to the repair of congenital, trauma induced, or other tendon or ligament defects of other origin, and is also useful in cosmetic plastic surgery for attachment or repair of tendons or ligaments. The compositions of the present invention may provide environment to attract tendon- or ligament-forming cells, stimulate growth of tendon- or ligament-forming cells, induce differentiation of progenitors of tendon- or ligament-forming cells, or induce growth of tendon/ligament cells or progenitors ex vivo for return in vivo to effect tissue repair. The compositions of the invention may also be useful in the treatment of tendinitis, carpal tunnel syndrome and other tendon or ligament defects. The compositions may also include an appropriate matrix and/or sequestering agent as a carrier as is well known in the art.

[0174] The compositions of the present invention may also be useful for proliferation of neural cells and for regeneration of nerve and brain tissue, i.e. for the treatment of central and peripheral nervous system diseases and neuropathies, as well as mechanical and traumatic disorders, which involve degeneration, death or trauma to neural cells or nerve tissue. More specifically, a composition may be used in the treatment of diseases of the peripheral nervous system, such as peripheral nerve injuries, peripheral neuropathy and localized neuropathies, and central nervous system diseases, such as Alzheimer's, Parkinson's disease, Huntington's disease, amyotrophic lateral sclerosis, and Shy-Drager syndrome. Further conditions which may be treated in accordance with the present invention include mechanical and traumatic disorders, such as spinal cord disorders, head trauma and cerebrovascular diseases such as stroke. Peripheral neuropathies resulting from chemotherapy or other medical therapies may also be treatable using a composition of the invention.

[0175] Compositions of the invention may also be useful to promote better or faster closure of non-healing wounds, including without limitation pressure ulcers, ulcers associated with vascular insufficiency, surgical and traumatic wounds, and the like.

[0176] Compositions of the present invention may also be involved in the generation or regeneration of other tissues, such as organs (including, for example, pancreas, liver, intestine, kidney, skin, endothelium), muscle (smooth, skeletal or cardiac) and vascular (including vascular endothelium) tissue, or for promoting the growth of cells comprising such tissues. Part of the desired effects may be by inhibition or modulation of fibrotic scarring may allow normal tissue to regenerate. A polypeptide of the present invention may also exhibit angiogenic activity.

[0177] A composition of the present invention may also be useful for gut protection or regeneration and treatment of lung or liver fibrosis, reperfusion injury in various tissues, and conditions resulting from systemic cytokine damage.

[0178] A composition of the present invention may also be useful for promoting or inhibiting differentiation of tissues described above from precursor tissues or cells; or for inhibiting the growth of tissues described above.

[0179] Therapeutic compositions of the invention can be used in the following:

[0180] Assays for tissue generation activity include, without limitation, those described in: International Patent Publication No. WO95/16035 (bone, cartilage, tendon); International Patent Publication No. WO95/05846 (nerve, neuronal); International Patent Publication No. WO91/07491 (skin, endothelium).

[0181] Assays for wound healing activity include, without limitation, those described in: Winter, Epidermal Wound Healing, pps. 71-112 (Maibach, H. I. and Rovee, D. T., eds.), Year Book Medical Publishers, Inc., Chicago, as modified by Eaglstein and Mertz, J. Invest. Dermatol 71:382-84 (1978).

[0182] 4.7.7 Immune Stimulating or Suppressing Activity

[0183] A polypeptide of the present invention may also exhibit immune stimulating or immune suppressing activity, including without limitation the activities for which assays are described herein. A polynucleotide of the invention can encode a polypeptide exhibiting such activities. A protein may be useful in the treatment of various immune deficiencies and disorders (including severe combined immunodeficiency (SCID)), e.g., in regulating (up or down) growth and proliferation of T and/or B lymphocytes, as well as effecting the cytolytic activity of NK cells and other cell populations. These immune deficiencies may be genetic or be caused by viral (e.g., HIV) as well as bacterial or fungal infections, or may result from autoimmune disorders. More specifically, infectious diseases causes by viral, bacterial, fungal or other infection may be treatable using a protein of the present invention, including infections by HIV, hepatitis viruses, herpes viruses, mycobacteria, Leishmania spp., malaria spp. and various fungal infections such as candidiasis. Of course, in this regard, proteins of the present invention may also be useful where a boost to the immune system generally may be desirable, i.e., in the treatment of cancer.

[0184] Autoimmune disorders which may be treated using a protein of the present invention include, for example, connective tissue disease, multiple sclerosis, systemic lupus erythematosus, rheumatoid arthritis, autoimmune pulmonary inflammation, Guillain-Barre syndrome, autoimmune thyroiditis, insulin dependent diabetes mellitis, myasthenia gravis, graft-versus-host disease and autoimmune inflammatory eye disease. Such a protein (or antagonists thereof, including antibodies) of the present invention may also to be useful in the treatment of allergic reactions and conditions (e.g., anaphylaxis, serum sickness, drug reactions, food allergies, insect venom allergies, mastocytosis, allergic rhinitis, hypersensitivity pneumonitis, urticaria, angioedema, eczema, atopic dermatitis, allergic contact dermatitis, erythema multiforme, Stevens-Johnson syndrome, allergic conjunctivitis, atopic keratoconjunctivitis, venereal keratoconjunctivitis, giant papillary conjunctivitis and contact allergies), such as asthma (particularly allergic asthma) or other respiratory problems. Other conditions, in which immune suppression is desired (including, for example, organ transplantation), may also be treatable using a protein (or antagonists thereof) of the present invention. The therapeutic effects of the polypeptides or antagonists thereof on allergic reactions can be evaluated by in vivo animals models such as the cumulative contact enhancement test (Lastborn et al., Toxicology 125: 59-66, 1998), skin prick test (Hoffmann et al., Allergy 54: 446-54, 1999), guinea pig skin sensitization test (Vohr et al., Arch. Toxocol. 73: 501-9), and murine local lymph node assay (Kimber et al., J. Toxicol. Environ. Health 53: 563-79).

[0185] Using the proteins of the invention it may also be possible to modulate immune responses, in a number of ways. Down regulation may be in the form of inhibiting or blocking an immune response already in progress or may involve preventing the induction of an immune response. The functions of activated T cells may be inhibited by suppressing T cell responses or by inducing specific tolerance in T cells, or both. Immunosuppression of T cell responses is generally an active, non-antigen-specific, process which requires continuous exposure of the T cells to the suppressive agent. Tolerance, which involves inducing non-responsiveness or anergy in T cells, is distinguishable from immunosuppression in that it is generally antigen-specific and persists after exposure to the tolerizing agent has ceased. Operationally, tolerance can be demonstrated by the lack of a T cell response upon reexposure to specific antigen in the absence of the tolerizing agent.

[0186] Down regulating or preventing one or more antigen functions (including without limitation B lymphocyte antigen functions (such as, for example, B7)), e.g., preventing high level lymphokine synthesis by activated T cells, will be useful in situations of tissue, skin and organ transplantation and in graft-versus-host disease (GVHD). For example, blockage of T cell function should result in reduced tissue destruction in tissue transplantation. Typically, in tissue transplants, rejection of the transplant is initiated through its recognition as foreign by T cells, followed by an immune reaction that destroys the transplant. The administration of a therapeutic composition of the invention may prevent cytokine synthesis by immune cells, such as T cells, and thus acts as an immunosuppressant. Moreover, a lack of costimulation may also be sufficient to anergize the T cells, thereby inducing tolerance in a subject. Induction of long-term tolerance by B lymphocyte antigen-blocking reagents may avoid the necessity of repeated administration of these blocking reagents. To achieve sufficient immunosuppression or tolerance in a subject, it may also be necessary to block the function of a combination of B lymphocyte antigens.

[0187] The efficacy of particular therapeutic compositions in preventing organ transplant rejection or GVHD can be assessed using animal models that are predictive of efficacy in humans. Examples of appropriate systems which can be used include allogeneic cardiac grafts in rats and xenogeneic pancreatic islet cell grafts in mice, both of which have been used to examine the immunosuppressive effects of CTLA4Ig fusion proteins in vivo as described in Lenschow et al., Science 257:789-792 (1992) and Turka et al., Proc. Natl. Acad. Sci USA, 89:11102-11105 (1992). In addition, murine models of GVHD (see Paul ed., Fundamental Immunology, Raven Press, New York, 1989, pp. 846-847) can be used to determine the effect of therapeutic compositions of the invention on the development of that disease.

[0188] Blocking antigen function may also be therapeutically useful for treating autoimmune diseases. Many autoimmune disorders are the result of inappropriate activation of T cells that are reactive against self tissue and which promote the production of cytokines and autoantibodies involved in the pathology of the diseases. Preventing the activation of autoreactive T cells may reduce or eliminate disease symptoms. Administration of reagents which block stimulation of T cells can be used to inhibit T cell activation and prevent production of autoantibodies or T cell-derived cytokines which may be involved in the disease process. Additionally, blocking reagents may induce antigen-specific tolerance of autoreactive T cells which could lead to long-term relief from the disease. The efficacy of blocking reagents in preventing or alleviating autoimmune disorders can be determined using a number of well-characterized animal models of human autoimmune diseases. Examples include murine experimental autoimmune encephalitis, systemic lupus erythmatosis in MRL/lpr/lpr mice or NZB hybrid mice, murine autoimmune collagen arthritis, diabetes mellitus in NOD mice and BB rats, and murine experimental myasthenia gravis (see Paul ed., Fundamental Immunology, Raven Press, New York, 1989, pp. 840-856).

[0189] Upregulation of an antigen function (e.g., a B lymphocyte antigen function), as a means of up regulating immune responses, may also be useful in therapy. Upregulation of immune responses may be in the form of enhancing an existing immune response or eliciting an initial immune response. For example, enhancing an immune response may be useful in cases of viral infection, including systemic viral diseases such as influenza, the common cold, and encephalitis.

[0190] Alternatively, anti-viral immune responses may be enhanced in an infected patient by removing T cells from the patient, costimulating the T cells in vitro with viral antigen-pulsed APCs either expressing a peptide of the present invention or together with a stimulatory form of a soluble peptide of the present invention and reintroducing the in vitro activated T cells into the patient. Another method of enhancing anti-viral immune responses would be to isolate infected cells from a patient, transfect them with a nucleic acid encoding a protein of the present invention as described herein such that the cells express all or a portion of the protein on their surface, and reintroduce the transfected cells into the patient. The infected cells would now be capable of delivering a costimulatory signal to, and thereby activate, T cells in vivo.

[0191] A polypeptide of the present invention may provide the necessary stimulation signal to T cells to induce a T cell mediated immune response against the transfected tumor cells. In addition, tumor cells which lack MHC class I or MHC class II molecules, or which fail to reexpress sufficient mounts of MHC class I or MHC class II molecules, can be transfected with nucleic acid encoding all or a portion of (e.g., a cytoplasmic-domain truncated portion) of an MHC class I alpha chain protein and β₂ microglobulin protein or an MHC class II alpha chain protein and an MHC class II beta chain protein to thereby express MHC class I or MHC class II proteins on the cell surface. Expression of the appropriate class I or class II MHC in conjunction with a peptide having the activity of a B lymphocyte antigen (e.g., B7-1, B7-2, B7-3) induces a T cell mediated immune response against the transfected tumor cell. Optionally, a gene encoding an antisense construct which blocks expression of an MHC class II associated protein, such as the invariant chain, can also be cotransfected with a DNA encoding a peptide having the activity of a B lymphocyte antigen to promote presentation of tumor associated antigens and induce tumor specific immunity. Thus, the induction of a T cell mediated immune response in a human subject may be sufficient to overcome tumor-specific tolerance in the subject.

[0192] The activity of a protein of the invention may, among other means, be measured by the following methods:

[0193] Suitable assays for thymocyte or splenocyte cytotoxicity include, without limitation, those described in: Current Protocols in Immunology, Ed by J. E. Coligan, A. M. Kruisbeek, D. H. Margulies, E. M. Shevach, W. Strober, Pub. Greene Publishing Associates and Wiley-Interscience (Chapter 3, In Vitro assays for Mouse Lymphocyte Function 3.1-3.19; Chapter 7, Immunologic studies in Humans); Herrmann et al., Proc. Natl. Acad. Sci. USA 78:2488-2492, 1981; Herrmann et al., J. Immunol. 128:1968-1974, 1982; Handa et al., J. Immunol. 135:1564-1572, 1985; Takai et al., I. Immunol. 137:3494-3500, 1986; Takai et al., J. Immunol. 140:508-512, 1988; Bowman et al., J. Virology 61:1992-1998; Bertagnolli et al., Cellular Immunology 133:327-341, 1991; Brown et al., J. Immunol. 153:3079-3092, 1994.

[0194] Assays for T-cell-dependent immunoglobulin responses and isotype switching (which will identify, among others, proteins that modulate T-cell dependent antibody responses and that affect Th1/Th2 profiles) include, without limitation, those described in: Maliszewski, J. Immunol. 144:3028-3033, 1990; and Assays for B cell function: In vitro antibody production, Mond, J. J. and Brunswick, M. In Current Protocols in Immunology. J. E. e.a. Coligan eds. Vol 1 pp. 3.8.1-3.8.16, John Wiley and Sons, Toronto. 1994.

[0195] Mixed lymphocyte reaction (MLR) assays (which will identify, among others, proteins that generate predominantly Th1 and CTL responses) include, without limitation, those described in: Current Protocols in Immunology, Ed by J. E. Coligan, A. M. Kruisbeek, D. H. Margulies, E. M. Shevach, W. Strober, Pub. Greene Publishing Associates and Wiley-Interscience (Chapter 3, In Vitro assays for Mouse Lymphocyte Function 3.1-3.19; Chapter 7, Immunologic studies in Humans); Takai et al., J. Immunol. 137:3494-3500, 1986; Takai et al., J. Immunol. 140:508-512, 1988; Bertagnolli et al., J. Immunol. 149:3778-3783, 1992.

[0196] Dendritic cell-dependent assays (which will identify, among others, proteins expressed by dendritic cells that activate naive T-cells) include, without limitation, those described in: Guery et al., J. Immunol. 134:536-544, 1995; Inaba et al., Journal of Experimental Medicine 173:549-559, 1991; Macatonia et al., Journal of Immunology 154:5071-5079, 1995; Porgador et al., Journal of Experimental Medicine 182:255-260, 1995; Nair et al., Journal of Virology 67:4062-4069, 1993; Huang et al., Science 264:961-965, 1994; Macatonia et al., Journal of Experimental Medicine 169:1255-1264, 1989; Bhardwaj et al., Journal of Clinical Investigation 94:797-807, 1994; and Inaba et al., Journal of Experimental Medicine 172:631-640, 1990.

[0197] Assays for lymphocyte survival/apoptosis (which will identify, among others, proteins that prevent apoptosis after superan-tigen induction and proteins that regulate lymphocyte homeostasis) include, without limitation, those described in: Darzynkiewicz et al., Cytometry 13:795-808, 1992; Gorozyca et al., Leukemia 7:659-670, 1993; Gorczyca et al., Cancer Research 53:1945-1951, 1993; Itoh et al., Cell 66:233-243, 1991; Zacharchuk, Journal of Immunology 145:4037-4045, 1990; Zamai et al., Cytometry 14:891-897, 1993; Gorczyca et al., International Journal of Oncology 1:639-648, 1992.

[0198] Assays for proteins that influence early steps of T-cell commitment and development include, without limitation, those described in: Antica et al., Blood 84:111-117, 1994; Fine et al., Cellular Immunology 155:111-122, 1994; Galy et al., Blood 85:2770-2778, 1995; Toki et al., Proc. Nat. Acad. Sci. USA 88:7548-7551, 1991.

[0199] 4.7.8 Activin/Inhibin Activity

[0200] A polypeptide of the present invention may also exhibit activin- or inhibin-related activities. A polynucleotide of the invention may encode a polypeptide exhibiting such characteristics. Inhibins are characterized by their ability to inhibit the release of follicle stimulating hormone (FSH), while activins and are characterized by their ability to stimulate the release of follicle stimulating hormone (FSH). Thus, a polypeptide of the present invention, alone or in heterodimers with a member of the inhibin family, may be useful as a contraceptive based on the ability of inhibins to decrease fertility in female mammals and decrease spermatogenesis in male mammals. Administration of sufficient amounts of other inhibins can induce infertility in these mammals. Alternatively, the polypeptide of the invention, as a homodimer or as a heterodimer with other protein subunits of the inhibin group, may be useful as a fertility inducing therapeutic, based upon the ability of activin molecules in stimulating FSH release from cells of the anterior pituitary. See, for example, U.S. Pat. No. 4,798,885. A polypeptide of the invention may also be useful for advancement of the onset of fertility in sexually immature mammals, so as to increase the lifetime reproductive performance of domestic animals such as, but not limited to, cows, sheep and pigs.

[0201] The activity of a polypeptide of the invention may, among other means, be measured by the following methods.

[0202] Assays for activin/inhibin activity include, without limitation, those described in: Vale et al., Endocrinology 91:562-572, 1972; Ling et al., Nature 321:779-782, 1986; Vale et al., Nature 321:776-779, 1986; Mason et al., Nature 318:659-663, 1985; Forage et al., Proc. Natl. Acad. Sci. USA 83:3091-3095, 1986.

[0203] 4.7.9 Chemotactic/Chemokinetic Activity

[0204] A polypeptide of the present invention may be involved in chemotactic or chemokinetic activity for mammalian cells, including, for example, monocytes, fibroblasts, neutrophils, T-cells, mast cells, eosinophils, epithelial and/or endothelial cells. A polynucleotide of the invention can encode a polypeptide exhibiting such attributes. Chemotactic and chemokinetic receptor activation can be used to mobilize or attract a desired cell population to a desired site of action. Chemotactic or chemokinetic compositions (e.g. proteins, antibodies, binding partners, or modulators of the invention) provide particular advantages in treatment of wounds and other trauma to tissues, as well as in treatment of localized infections. For example, attraction of lymphocytes, monocytes or neutrophils to tumors or sites of infection may result in improved immune responses against the tumor or infecting agent.

[0205] A protein or peptide has chemotactic activity for a particular cell population if it can stimulate, directly or indirectly, the directed orientation or movement of such cell population. Preferably, the protein or peptide has the ability to directly stimulate directed movement of cells. Whether a particular protein has chemotactic activity for a population of cells can be readily determined by employing such protein or peptide in any known assay for cell chemotaxis.

[0206] Therapeutic compositions of the invention can be used in the following:

[0207] Assays for chemotactic activity (which will identify proteins that induce or prevent chemotaxis) consist of assays that measure the ability of a protein to induce the migration of cells across a membrane as well as the ability of a protein to induce the adhesion of one cell population to another cell population. Suitable assays for movement and adhesion include, without limitation, those described in: Current Protocols in Immunology, Ed by J. E. Coligan, A. M. Kruisbeek, D. H. Marguiles, E. M. Shevach, W. Strober, Pub. Greene Publishing Associates and Wiley-Interscience (Chapter 6.12, Measurement of alpha and beta Chemokines 6.12.1-6.12.28; Taub et al. J. Clin. Invest. 95:1370-1376, 1995; Lind et al. APMIS 103:140-146, 1995; Muller et al Eur. J. Immunol. 25:1744-1748; Gruber et al. J. of Immunol. 152:5860-5867, 1994; Johnston et al. J. of Immunol. 153:1762-1768, 1994.

[0208] 4.7.10 Hemostatic and Thrombolytic Activity

[0209] A polypeptide of the invention may also be involved in hemostatis or thrombolysis or thrombosis. A polynucleotide of the invention can encode a polypeptide exhibiting such attributes. Compositions may be useful in treatment of various coagulation disorders (including hereditary disorders, such as hemophilias) or to enhance coagulation and other hemostatic events in treating wounds resulting from trauma, surgery or other causes. A composition of the invention may also be useful for dissolving or inhibiting formation of thromboses and for treatment and prevention of conditions resulting therefrom (such as, for example, infarction of cardiac and central nervous system vessels (e.g., stroke).

[0210] Therapeutic compositions of the invention can be used in the following:

[0211] Assay for hemostatic and thrombolytic activity include, without limitation, those described in: Linet et al., J. Clin. Pharmacol. 26:131-140, 1986; Burdick et al., Thrombosis Res. 45:413-419, 1987; Humphrey et al., Fibrinolysis 5:71-79 (1991); Schaub, Prostaglandins 35:467-474, 1988.

[0212] 4.7.11 Cancer Diagnosis and Therapy

[0213] Polypeptides of the invention may be involved in cancer cell generation, proliferation or metastasis. Detection of the presence or amount of polynucleotides or polypeptides of the invention may be useful for the diagnosis and/or prognosis of one or more types of cancer. For example, the presence or increased expression of a polynucleotide/polypeptide of the invention may indicate a hereditary risk of cancer, a precancerous condition, or an ongoing malignancy. Conversely, a defect in the gene or absence of the polypeptide may be associated with a cancer condition. Identification of single nucleotide polymorphisms associated with cancer or a predisposition to cancer may also be useful for diagnosis or prognosis.

[0214] Cancer treatments promote tumor regression by inhibiting tumor cell proliferation, inhibiting angiogenesis (growth of new blood vessels that is necessary to support tumor growth) and/or prohibiting metastasis by reducing tumor cell motility or invasiveness. Therapeutic compositions of the invention may be effective in adult and pediatric oncology including in solid phase tumors/malignancies, locally advanced tumors, human soft tissue sarcomas, metastatic cancer, including lymphatic metastases, blood cell malignancies including multiple myeloma, acute and chronic leukemias, and lymphomas, head and neck cancers including mouth cancer, larynx cancer and thyroid cancer, lung cancers including small cell carcinoma and non-small cell cancers, breast cancers including small cell carcinoma and ductal carcinoma, gastrointestinal cancers including esophageal cancer, stomach cancer, colon cancer, colorectal cancer and polyps associated with colorectal neoplasia, pancreatic cancers, liver cancer, urologic cancers including bladder cancer and prostate cancer, malignancies of the female genital tract including ovarian carcinoma, uterine (including endometrial) cancers, and solid tumor in the ovarian follicle, kidney cancers including renal cell carcinoma, brain cancers including intrinsic brain tumors, neuroblastoma, astrocytic brain tumors, gliomas, metastatic tumor cell invasion in the central nervous system, bone cancers including osteomas, skin cancers including malignant melanoma, tumor progression of human skin keratinocytes, squamous cell carcinoma, basal cell carcinoma, hemangiopericytoma and Karposi's sarcoma.

[0215] Polypeptides, polynucleotides, or modulators of polypeptides of the invention (including inhibitors and stimulators of the biological activity of the polypeptide of the invention) may be administered to treat cancer. Therapeutic compositions can be administered in therapeutically effective dosages alone or in combination with adjuvant cancer therapy such as surgery, chemotherapy, radiotherapy, thermotherapy, and laser therapy, and may provide a beneficial effect, e.g. reducing tumor size, slowing rate of tumor growth, inhibiting metastasis, or otherwise improving overall clinical condition, without necessarily eradicating the cancer.

[0216] The composition can also be administered in therapeutically effective amounts as a portion of an anti-cancer cocktail. An anti-cancer cocktail is a mixture of the polypeptide or modulator of the invention with one or more anti-cancer drugs in addition to a pharmaceutically acceptable carrier for delivery. The use of anti-cancer cocktails as a cancer treatment is routine. Anti-cancer drugs that are well known in the art and can be used as a treatment in combination with the polypeptide or modulator of the invention include: Actinomycin D, Aminoglutethimide, Asparaginase, Bleomycin, Busulfan, Carboplatin, Carmustine, Chlorambucil, Cisplatin (cis-DDP), Cyclophosphamide, Cytarabine HCl (Cytosine arabinoside), Dacarbazine, Dactinomycin, Daunorubicin HCl, Doxorubicin HCl, Estramustine phosphate sodium, Etoposide (V16-213), Floxuridine, 5-Fluorouracil (5-Fu), Flutamide, Hydroxyurea (hydroxycarbamide), Ifosfamide, Interferon Alpha-2a, Interferon Alpha-2b, Leuprolide acetate (LHRH-releasing factor analog), Lomustine, Mechlorethamine HCl (nitrogen mustard), Melphalan, Mercaptopurine, Mesna, Methotrexate (MTX), Mitomycin, Mitoxantrone HCl, Octreotide, Plicamycin, Procarbazine HCl, Streptozocin, Tamoxifen citrate, Thioguanine, Thiotepa, Vinblastine sulfate, Vincristine sulfate, Amsacrine, Azacitidine, Hexamethylmelamine, Interleukin-2, Mitoguazone, Pentostatin, Semustine, Teniposide, and Vindesine sulfate.

[0217] In addition, therapeutic compositions of the invention may be used for prophylactic treatment of cancer. There are hereditary conditions and/or environmental situations (e.g. exposure to carcinogens) known in the art that predispose an individual to developing cancers. Under these circumstances, it may be beneficial to treat these individuals with therapeutically effective doses of the polypeptide of the invention to reduce the risk of developing cancers.

[0218] In vitro models can be used to determine the effective doses of the polypeptide of the invention as a potential cancer treatment. These in vitro models include proliferation assays of cultured tumor cells, growth of cultured tumor cells in soft agar (see Freshney, (1987) Culture of Animal Cells: A Manual of Basic Technique, Wily-Liss, New York, N.Y. Ch 18 and Ch 21), tumor systems in nude mice as described in Giovanella et al., J. Natl. Can. Inst., 52: 921-30 (1974), mobility and invasive potential of tumor cells in Boyden Chamber assays as described in Pilkington et al., Anticancer Res., 17: 4107-9 (1997), and angiogenesis assays such as induction of vascularization of the chick chorioallantoic membrane or induction of vascular endothelial cell migration as described in Ribatta et al., Intl. J. Dev. Biol., 40: 1189-97 (1999) and Li et al., Clin. Exp. Metastasis, 17:423-9 (1999), respectively. Suitable tumor cells lines are available, e.g. from American Type Tissue Culture Collection catalogs.

[0219] 4.7.12 Receptor/Ligand Activity

[0220] A polypeptide of the present invention may also demonstrate activity as receptor, receptor ligand or inhibitor or agonist of receptor/ligand interactions. A polynucleotide of the invention can encode a polypeptide exhibiting such characteristics. Examples of such receptors and ligands include, without limitation, cytokine receptors and their ligands, receptor kinases and their ligands, receptor phosphatases and their ligands, receptors involved in cell-cell interactions and their ligands (including without limitation, cellular adhesion molecules (such as selecting, integrins and their ligands) and receptor/ligand pairs involved in antigen presentation, antigen recognition and development of cellular and humoral immune responses. Receptors and ligands are also useful for screening of potential peptide or small molecule inhibitors of the relevant receptor/ligand interaction. A protein of the present invention (including, without limitation, fragments of receptors and ligands) may themselves be useful as inhibitors of receptor/ligand interactions.

[0221] The activity of a polypeptide of the invention may, among other means, be measured by the following methods:

[0222] Suitable assays for receptor-ligand activity include without limitation those described in: Current Protocols in Immunology, Ed by J. E. Coligan, A. M. Kruisbeek, D. H. Margulies, E. M. Shevach, W. Strober, Pub. Greene Publishing Associates and Wiley-Interscience (Chapter 7.28, Measurement of Cellular Adhesion under static conditions 7.28.1-7.28.22), Takai et al., Proc. Natl. Acad. Sci. USA 84:6864-6868, 1987; Bierer et al., J. Exp. Med. 168:1145-1156, 1988; Rosenstein et al., J. Exp. Med. 169:149-160 1989; Stoltenborg et al., J. Immunol. Methods 175:59-68, 1994; Stitt et al., Cell 80:661-670, 1995.

[0223] By way of example, the polypeptides of the invention may be used as a receptor for a ligand(s) thereby transmitting the biological activity of that ligand(s). Ligands may be identified through binding assays, affinity chromatography, dihybrid screening assays, BIAcore assays, gel overlay assays, or other methods known in the art.

[0224] Studies characterizing drugs or proteins as agonist or antagonist or partial agonists or a partial antagonist require the use of other proteins as competing ligands. The polypeptides of the present invention or ligand(s) thereof may be labeled by being coupled to radioisotopes, calorimetric molecules or a toxin molecules by conventional methods. (“Guide to Protein Purification” Murray P. Deutscher (ed) Methods in Enzymology Vol. 182 (1990) Academic Press, Inc. San Diego). Examples of radioisotopes include, but are not limited to, tritium and carbon-14. Examples of colorimetric molecules include, but are not limited to, fluorescent molecules such as fluorescamine, or rhodamine or other colorimetric molecules. Examples of toxins include, but are not limited, to ricin.

[0225] 4.7.13 Drug Screening

[0226] This invention is particularly useful for screening chemical compounds by using the novel polypeptides or binding fragments thereof in any of a variety of drug screening techniques. The polypeptides or fragments employed in such a test may either be free in solution, affixed to a solid support, borne on a cell surface or located intracellularly. One method of drug screening utilizes eukaryotic or prokaryotic host cells which are stably transformed with recombinant nucleic acids expressing the polypeptide or a fragment thereof. Drugs are screened against such transformed cells in competitive binding assays. Such cells, either in viable or fixed form, can be used for standard binding assays. One may measure, for example, the formation of complexes between polypeptides of the invention or fragments and the agent being tested or examine the diminution in complex formation between the novel polypeptides and an appropriate cell line, which are well known in the art.

[0227] Sources for test compounds that may be screened for ability to bind to or modulate (i.e., increase or decrease) the activity of polypeptides of the invention include (1) inorganic and organic chemical libraries, (2) natural product libraries, and (3) combinatorial libraries comprised of either random or mimetic peptides, oligonucleotides or organic molecules.

[0228] Chemical libraries may be readily synthesized or purchased from a number of commercial sources, and may include structural analogs of known compounds or compounds that are identified as “hits” or “leads” via natural product screening.

[0229] The sources of natural product libraries are microorganisms (including bacteria and fungi), animals, plants or other vegetation, or marine organisms, and libraries of mixtures for screening may be created by: (1) fermentation and extraction of broths from soil, plant or marine microorganisms or (2) extraction of the organisms themselves. Natural product libraries include polyketides, non-ribosomal peptides, and (non-naturally occurring) variants thereof. For a review, see Science 282:63-68 (1998).

[0230] Combinatorial libraries are composed of large numbers of peptides, oligonucleotides or organic compounds and can be readily prepared by traditional automated synthesis methods, PCR, cloning or proprietary synthetic methods. Of particular interest are peptide and oligonucleotide combinatorial libraries. Still other libraries of interest include peptide, protein, peptidomimetic, multiparallel synthetic collection, recombinatorial, and polypeptide libraries. For a review of combinatorial chemistry and libraries created therefrom, see Myers, Curr. Opin. Biotechnol. 8:701-707 (1997). For reviews and examples of peptidomimetic libraries, see Al-Obeidi et al., Mol. Biotechnol, 9(3):205-23 (1998); Hruby et al., Curr Opin Chem Biol, 1(1):114-19 (1997); Dorner et al., Bioorg Med Chem, 4(5):709-15 (1996) (alkylated dipeptides).

[0231] Identification of modulators through use of the various libraries described herein permits modification of the candidate “hit” (or “lead”) to optimize the capacity of the “hit” to bind a polypeptide of the invention. The molecules identified in the binding assay are then tested for antagonist or agonist activity in in vivo tissue culture or animal models that are well known in the art. In brief, the molecules are titrated into a plurality of cell cultures or animals and then tested for either cell/animal death or prolonged survival of the animal/cells.

[0232] The binding molecules thus identified may be complexed with toxins, e.g., ricin or cholera, or with other compounds that are toxic to cells such as radioisotopes. The toxin-binding molecule complex is then targeted to a tumor or other cell by the specificity of the binding molecule for a polypeptide of the invention. Alternatively, the binding molecules may be complexed with imaging agents for targeting and imaging purposes.

[0233] 4.7.14 Assay for Receptor Activity

[0234] The invention also provides methods to detect specific binding of a polypeptide e.g. a ligand or a receptor. The art provides numerous assays particularly useful for identifying previously unknown binding partners for receptor polypeptides of the invention. For example, expression cloning using mammalian or bacterial cells, or dihybrid screening assays can be used to identify polynucleotides encoding binding partners. As another example, affinity chromatography with the appropriate immobilized polypeptide of the invention can be used to isolate polypeptides that recognize and bind polypeptides of the invention. There are a number of different libraries used for the identification of compounds, and in particular small molecules, that modulate (i.e., increase or decrease) biological activity of a polypeptide of the invention. Ligands for receptor polypeptides of the invention can also be identified by adding exogenous ligands, or cocktails of ligands to two cells populations that are genetically identical except for the expression of the receptor of the invention: one cell population expresses the receptor of the invention whereas the other does not. The response of the two cell populations to the addition of ligands(s) are then compared. Alternatively, an expression library can be co-expressed with the polypeptide of the invention in cells and assayed for an autocrine response to identify potential ligand(s). As still another example, BIAcore assays, gel overlay assays, or other methods known in the art can be used to identify binding partner polypeptides, including, (1) organic and inorganic chemical libraries, (2) natural product libraries, and (3) combinatorial libraries comprised of random peptides, oligonucleotides or organic molecules.

[0235] The role of downstream intracellular signaling molecules in the signaling cascade of the polypeptide of the invention can be determined. For example, a chimeric protein in which the cytoplasmic domain of the polypeptide of the invention is fused to the extracellular portion of a protein, whose ligand has been identified, is produced in a host cell. The cell is then incubated with the ligand specific for the extracellular portion of the chimeric protein, thereby activating the chimeric receptor. Known downstream proteins involved in intracellular signaling can then be assayed for expected modifications i.e. phosphorylation. Other methods known to those in the art can also be used to identify signaling molecules involved in receptor activity.

[0236] 4.7.15 Anti-Inflammatory Activity

[0237] Compositions of the present invention may also exhibit anti-inflammatory activity. The anti-inflammatory activity may be achieved by providing a stimulus to cells involved in the inflammatory response, by inhibiting or promoting cell-cell interactions (such as, for example, cell adhesion), by inhibiting or promoting chemotaxis of cells involved in the inflammatory process, inhibiting or promoting cell extravasation, or by stimulating or suppressing production of other factors which more directly inhibit or promote an inflammatory response. Compositions with such activities can be used to treat inflammatory conditions including chronic or acute conditions), including without limitation intimation associated with infection (such as septic shock, sepsis or systemic inflammatory response syndrome (SIRS)), ischemia-reperfusion injury, endotoxin lethality, arthritis, complement-mediated hyperacute rejection, nephritis, cytokine or chemokine-induced lung injury, inflammatory bowel disease, Crohn's disease or resulting from over production of cytokines such as TNF or IL-1. Compositions of the invention may also be useful to treat anaphylaxis and hypersensitivity to an antigenic substance or material. Compositions of this invention may be utilized to prevent or treat conditions such as, but not limited to, sepsis, acute pancreatitis, endotoxin shock, cytokine induced shock, rheumatoid arthritis, chronic inflammatory arthritis, pancreatic cell damage from diabetes mellitus type 1, graft versus host disease, inflammatory bowel disease, inflamation associated with pulmonary disease, other autoimmune disease or inflammatory disease, an antiproliferative agent such as for acute or chronic mylegenous leukemia or in the prevention of premature labor secondary to intrauterine infections.

[0238] 4.7.16 Leukemias

[0239] Leukemias and related disorders may be treated or prevented by administration of a therapeutic that promotes or inhibits function of the polynucleotides and/or polypeptides of the invention. Such leukemias and related disorders include but are not limited to acute leukemia, acute lymphocytic leukemia, acute myelocytic leukemia, myeloblastic, promyelocytic, myelomonocytic, monocytic, erythroleukemia, chronic leukemia, chronic myelocytic (granulocytic) leukemia and chronic lymphocytic leukemia (for a review of such disorders, see Fishman et al., 1985, Medicine, 2d Ed., J. B. Lippincott Co., Philadelphia).

[0240] 4.7.17 nervous System Disorders

[0241] Nervous system disorders, involving cell types which can be tested for efficacy of intervention with compounds that modulate the activity of the polynucleotides and/or polypeptides of the invention, and which can be treated upon thus observing an indication of therapeutic utility, include but are not limited to nervous system injuries, and diseases or disorders which result in either a disconnection of axons, a diminution or degeneration of neurons, or demyelination. Nervous system lesions which may be treated in a patient (including human and non-human mammalian patients) according to the invention include but are not limited to the following lesions of either the central (including spinal cord, brain) or peripheral nervous systems:

[0242] (i) traumatic lesions, including lesions caused by physical injury or associated with surgery, for example, lesions which sever a portion of the nervous system, or compression injuries;

[0243] (ii) ischemic lesions, in which a lack of oxygen in a portion of the nervous system results in neuronal injury or death, including cerebral infarction or ischemia, or spinal cord infarction or ischemia;

[0244] (iii) infectious lesions, in which a portion of the nervous system is destroyed or injured as a result of infection, for example, by an abscess or associated with infection by human immunodeficiency virus, herpes zoster, or herpes simplex virus or with Lyme disease, tuberculosis, syphilis;

[0245] (iv) degenerative lesions, in which a portion of the nervous system is destroyed or injured as a result of a degenerative process including but not limited to degeneration associated with Parkinson's disease, Alzheimer's disease, Huntington's chorea, or amyotrophic lateral sclerosis;

[0246] (v) lesions associated with nutritional diseases or disorders, in which a portion of the nervous system is destroyed or injured by a nutritional disorder or disorder of metabolism including but not limited to, vitamin B12 deficiency, folic acid deficiency, Wernicke disease, tobacco-alcohol amblyopia, Marchiafava-Bignami disease (primary degeneration of the corpus callosum), and alcoholic cerebellar degeneration;

[0247] (vi) neurological lesions associated with systemic diseases including but not limited to diabetes (diabetic neuropathy, Bell's palsy), systemic lupus erythematosus, carcinoma, or sarcoidosis;

[0248] (vii) lesions caused by toxic substances including alcohol, lead, or particular neurotoxins; and

[0249] (viii) demyelinated lesions in which a portion of the nervous system is destroyed or injured by a demyelinating disease including but not limited to multiple sclerosis, human immunodeficiency virus-associated myelopathy, transverse myelopathy or various etiologies, progressive multifocal leukoencephalopathy, and central pontine myelinolysis.

[0250] Therapeutics which are useful according to the invention for treatment of a nervous system disorder may be selected by testing for biological activity in promoting the survival or differentiation of neurons. For example, and not by way of limitation, therapeutics which elicit any of the following effects may be useful according to the invention:

[0251] (i) increased survival time of neurons in culture;

[0252] (ii) increased sprouting of neurons in culture or in vivo;

[0253] (iii) increased production of a neuron-associated molecule in culture or in vivo, e.g., choline acetyltransferase or acetylcholinesterase with respect to motor neurons; or

[0254] (iv) decreased symptoms of neuron dysfunction in vivo.

[0255] Such effects may be measured by any method known in the art. In preferred, non-limiting embodiments, increased survival of neurons may be measured by the method set forth in Arakawa et al. (1990, J. Neurosci. 10:3507-3515); increased sprouting of neurons may be detected by methods set forth in Pestronk et al. (1980, Exp. Neurol. 70:65-82) or Brown et al. (1981, Ann. Rev. Neurosci. 4:17-42); increased production of neuron-associated molecules may be measured by bioassay, enzymatic assay, antibody binding, Northern blot assay, etc., depending on the molecule to be measured; and motor neuron dysfunction may be measured by assessing the physical manifestation of motor neuron disorder, e.g., weakness, motor neuron conduction velocity, or functional disability.

[0256] In specific embodiments, motor neuron disorders that may be treated according to the invention include but are not limited to disorders such as infarction, infection, exposure to toxin, trauma, surgical damage, degenerative disease or malignancy that may affect motor neurons as well as other components of the nervous system, as well as disorders that selectively affect neurons such as amyotrophic lateral sclerosis, and including but not limited to progressive spinal muscular atrophy, progressive bulbar palsy, primary lateral sclerosis, infantile and juvenile muscular atrophy, progressive bulbar paralysis of childhood (Fazio-Londe syndrome), poliomyelitis and the post polio syndrome, and Hereditary Motorsensory Neuropathy (Charcot-Marie-Tooth Disease).

[0257] 4.7.18 Other Activities

[0258] A polypeptide of the invention may also exhibit one or more of the following additional activities or effects: inhibiting the growth, infection or function of, or killing, infectious agents, including, without limitation, bacteria, viruses, fungi and other parasites; effecting (suppressing or enhancing) bodily characteristics, including, without limitation, height, weight, hair color, eye color, skin, fat to lean ratio or other tissue pigmentation, or organ or body part size or shape (such as, for example, breast augmentation or diminution, change in bone form or shape); effecting biorhythms or circadian cycles or rhythms; effecting the fertility of male or female subjects; effecting the metabolism, catabolism, anabolism, processing, utilization, storage or elimination of dietary fat, lipid, protein, carbohydrate, vitamins, minerals, co-factors or other nutritional factors or component(s); effecting behavioral characteristics, including, without limitation, appetite, libido, stress, cognition (including cognitive disorders), depression (including depressive disorders) and violent behaviors; providing analgesic effects or other pain reducing effects; promoting differentiation and growth of embryonic stem cells in lineages other than hematopoietic lineages; hormonal or endocrine activity; in the case of enzymes, correcting deficiencies of the enzyme and treating deficiency-related diseases; treatment of hyperproliferative disorders (such as, for example, psoriasis); immunoglobulin-like activity (such as, for example, the ability to bind antigens or complement); and the ability to act as an antigen in a vaccine composition to raise an immune response against such protein or another material or entity which is cross-reactive with such protein.

[0259] 4.7.19 Identification of Polymorphisms

[0260] The demonstration of polymorphisms makes possible the identification of such polymorphisms in human subjects and the pharmacogenetic use of this information for diagnosis and treatment. Such polymorphisms may be associated with, e.g., differential predisposition or susceptibility to various disease states (such as disorders involving inflammation or immune response) or a differential response to drug administration, and this genetic information can be used to tailor preventive or therapeutic treatment appropriately. For example, the existence of a polymorphism associated with a predisposition to inflammation or autoimmune disease makes possible the diagnosis of this condition in humans by identifying the presence of the polymorphism.

[0261] Polymorphisms can be identified in a variety of ways known in the art which all generally involve obtaining a sample from a patient, analyzing DNA from the sample, optionally involving isolation or amplification of the DNA, and identifying the presence of the polymorphism in the DNA. For example, PCR may be used to amplify an appropriate fragment of genomic DNA which may then be sequenced. Alternatively, the DNA may be subjected to allele-specific oligonucleotide hybridization (in which appropriate oligonucleotides are hybridized to the DNA under conditions permitting detection of a single base mismatch) or to a single nucleotide extension assay (in which an oligonucleotide that hybridizes immediately adjacent to the position of the polymorphism is extended with one or more labeled nucleotides). In addition, traditional restriction fragment length polymorphism analysis (using restriction enzymes that provide differential digestion of the genomic DNA depending on the presence or absence of the polymorphism) may be performed. Arrays with nucleotide sequences of the present invention can be used to detect polymorphisms. The array can comprise modified nucleotide sequences of the present invention in order to detect the nucleotide sequences of the present invention. In the alternative, any one of the nucleotide sequences of the present invention can be placed on the array to detect changes from those sequences.

[0262] Alternatively a polymorphism resulting in a change in the amino acid sequence could also be detected by detecting a corresponding change in amino acid sequence of the protein, e.g., by an antibody specific to the variant sequence.

[0263] 4.7.20 Arthritis and Inflammation

[0264] The immunosuppressive effects of the compositions of the invention against rheumatoid arthritis is determined in an experimental animal model system. The experimental model system is adjuvant induced arthritis in rats, and the protocol is described by J. Holoshitz, et al., 1983, Science, 219:56, or by B. Waksman et al., 1963, Int. Arch. Allergy Appl. Immunol., 23:129. Induction of the disease can be caused by a single injection, generally intradermally, of a suspension of killed Mycobacterium tuberculosis in complete Freund's adjuvant (CFA). The route of injection can vary, but rats may be injected at the base of the tail with an adjuvant mixture. The polypeptide is administered in phosphate buffered solution (PBS) at a dose of about 1-5 mg/kg. The control consists of administering PBS only.

[0265] The procedure for testing the effects of the test compound would consist of intradermally injecting killed Mycobacterium tuberculosis in CFA followed by immediately administering the test compound and subsequent treatment every other day until day 24. At 14, 15, 18, 20, 22, and 24 days after injection of Mycobacterium CFA, an overall arthritis score may be obtained as described by J. Holoskitz above. An analysis of the data would reveal that the test compound would have a dramatic affect on the swelling of the joints as measured by a decrease of the arthritis score.

[0266] 4.8 Therapeutic Methods

[0267] The compositions (including polypeptide fragments, analogs, variants and antibodies or other binding partners or modulators including antisense polynucleotides) of the invention have numerous applications in a variety of therapeutic methods. Examples of therapeutic applications include, but are not limited to, those exemplified herein.

[0268] 4.8.1 Example

[0269] One embodiment of the invention is the administration of an effective amount of the polypeptides or other composition of the invention to individuals affected by a disease or disorder that can be modulated by regulating the peptides of the invention. While the mode of administration is not particularly important, parenteral administration is preferred. An exemplary mode of administration is to deliver an intravenous bolus. The dosage of the polypeptides or other composition of the invention will normally be determined by the prescribing physician. It is to be expected that the dosage will vary according to the age, weight, condition and response of the individual patient. Typically, the amount of polypeptide administered per dose will be in the range of about 0.01 μg/kg to 100 mg/kg of body weight, with the preferred dose being about 0.1 μg/kg to 10 mg/kg of patient body weight. For parenteral administration, polypeptides of the invention will be formulated in an injectable form combined with a pharmaceutically acceptable parenteral vehicle. Such vehicles are well known in the art and examples include water, saline, Ringer's solution, dextrose solution, and solutions consisting of small amounts of the human serum albumin. The vehicle may contain minor amounts of additives that maintain the isotonicity and stability of the polypeptide or other active ingredient. The preparation of such solutions is within the skill of the art.

[0270] 4.9 Pharmaceutical Formulations and Routes of Administration

[0271] A protein or other composition of the present invention (from whatever source derived, including without limitation from recombinant and non-recombinant sources and including antibodies and other binding partners of the polypeptides of the invention) may be administered to a patient in need, by itself, or in pharmaceutical compositions where it is mixed with suitable carriers or excipient(s) at doses to treat or ameliorate a variety of disorders. Such a composition may optionally contain (in addition to protein or other active ingredient and a carrier) diluents, fillers, salts, buffers, stabilizers, solubilizers, and other materials well known in the art. The term “pharmaceutically acceptable” means a non-toxic material that does not interfere with the effectiveness of the biological activity of the active ingredient(s). The characteristics of the carrier will depend on the route of administration. The pharmaceutical composition of the invention may also contain cytokines, lymphokines, or other hematopoietic factors such as M-CSF, GM-CSF, TNF, IL-1, IL-2, IL-3, IL-4, IL-5, IL-6, IL-7, IL-8, IL-9, IL-10, IL-11, IL-12, IL-13, IL-14, IL-15, IFN, TNF0, TNF1, TNF2, G-CSF, Meg-CSF, thrombopoietin, stem cell factor, and erythropoietin. In further compositions, proteins of the invention may be combined with other agents beneficial to the treatment of the disease or disorder in question. These agents include various growth factors such as epidermal growth factor (EGF), platelet-derived growth factor (PDGF), transforming growth factors (TGF-α and TGF-β), insulin-like growth factor (IGF), as well as cytokines described herein.

[0272] The pharmaceutical composition may further contain other agents which either enhance the activity of the protein or other active ingredient or complement its activity or use in treatment. Such additional factors and/or agents may be included in the pharmaceutical composition to produce a synergistic effect with protein or other active ingredient of the invention, or to minimize side effects. Conversely, protein or other active ingredient of the present invention may be included in formulations of the particular clotting factor, cytokine, lymphokine, other hematopoietic factor, thrombolytic or anti-thrombotic factor, or anti-inflammatory agent to minimize side effects of the clotting factor, cytokine, lymphokine, other hematopoietic factor, thrombolytic or anti-thrombotic factor, or anti-inflammatory agent (such as IL-1Ra, IL-1 Hy1, IL-1 Hy2, anti-TNF, corticosteroids, immunosuppressive agents). A protein of the present invention may be active in multimers (e.g., heterodimers or homodimers) or complexes with itself or other proteins. As a result, pharmaceutical compositions of the invention may comprise a protein of the invention in such multimeric or complexed form.

[0273] As an alternative to being included in a pharmaceutical composition of the invention including a first protein, a second protein or a therapeutic agent may be concurrently administered with the first protein (e.g., at the same time, or at differing times provided that therapeutic concentrations of the combination of agents is achieved at the treatment site). Techniques for formulation and administration of the compounds of the instant application may be found in “Remington's Pharmaceutical Sciences,” Mack Publishing Co., Easton, Pa., latest edition. A therapeutically effective dose further refers to that amount of the compound sufficient to result in amelioration of symptoms, e.g., treatment, healing, prevention or amelioration of the relevant medical condition, or an increase in rate of treatment, healing, prevention or amelioration of such conditions. When applied to an individual active ingredient, administered alone, a therapeutically effective dose refers to that ingredient alone. When applied to a combination, a therapeutically effective dose refers to combined amounts of the active ingredients that result in the therapeutic effect, whether administered in combination, serially or simultaneously.

[0274] In practicing the method of treatment or use of the present invention, a therapeutically effective amount of protein or other active ingredient of the present invention is administered to a mammal having a condition to be treated. Protein or other active ingredient of the present invention may be administered in accordance with the method of the invention either alone or in combination with other therapies such as treatments employing cytokines, lymphokines or other hematopoietic factors. When co-administered with one or more cytokines, lymphokines or other hematopoietic factors, protein or other active ingredient of the present invention may be administered either simultaneously with the cytokine(s), lymphokine(s), other hematopoietic factor(s), thrombolytic or anti-thrombotic factors, or sequentially. If administered sequentially, the attending physician will decide on the appropriate sequence of administering protein or other active ingredient of the present invention in combination with cytokine(s), lymphokine(s), other hematopoietic factor(s), thrombolytic or anti-thrombotic factors.

[0275] 4.9.1 Routes of Administration

[0276] Suitable routes of administration may, for example, include oral, rectal, transmucosal, or intestinal administration; parenteral delivery, including intramuscular, subcutaneous, intramedullary injections, as well as intrathecal, direct intraventricular, intravenous, intraperitoneal, intranasal, or intraocular injections. Administration of protein or other active ingredient of the present invention used in the pharmaceutical composition or to practice the method of the present invention can be carried out in a variety of conventional ways, such as oral ingestion, inhalation, topical application or cutaneous, subcutaneous, intraperitoneal, parenteral or intravenous injection. Intravenous administration to the patient is preferred.

[0277] Alternately, one may administer the compound in a local rather than systemic manner, for example, via injection of the compound directly into a arthritic joints or in fibrotic tissue, often in a depot or sustained release formulation. In order to prevent the scarring process frequently occurring as complication of glaucoma surgery, the compounds may be administered topically, for example, as eye drops. Furthermore, one may administer the drug in a targeted drug delivery system, for example, in a liposome coated with a specific antibody, targeting, for example, arthritic or fibrotic tissue. The liposomes will be targeted to and taken up selectively by the afflicted tissue.

[0278] The polypeptides of the invention are administered by any route that delivers an effective dosage to the desired site of action. The determination of a suitable route of administration and an effective dosage for a particular indication is within the level of skill in the art. Preferably for wound treatment, one administers the therapeutic compound directly to the site. Suitable dosage ranges for the polypeptides of the invention can be extrapolated from these dosages or from similar studies in appropriate animal models. Dosages can then be adjusted as necessary by the clinician to provide maximal therapeutic benefit.

[0279] 4.9.2 Compositions/Formulations

[0280] Pharmaceutical compositions for use in accordance with the present invention thus may be formulated in a conventional manner using one or more physiologically acceptable carriers comprising excipients and auxiliaries which facilitate processing of the active compounds into preparations which can be used pharmaceutically. These pharmaceutical compositions may be manufactured in a manner that is itself known, e.g., by means of conventional mixing, dissolving, granulating, dragee-making, levigating, emulsifying, encapsulating, entrapping or lyophilizing processes. Proper formulation is dependent upon the route of administration chosen. When a therapeutically effective amount of protein or other active ingredient of the present invention is administered orally, protein or other active ingredient of the present invention will be in the form of a tablet, capsule, powder, solution or elixir. When administered in tablet form, the pharmaceutical composition of the invention may additionally contain a solid carrier such as a gelatin or an adjuvant. The tablet, capsule, and powder contain from about 5 to 95% protein or other active ingredient of the present invention, and preferably from about 25 to 90% protein or other active ingredient of the present invention. When administered in liquid form, a liquid carrier such as water, petroleum, oils of animal or plant origin such as peanut oil, mineral oil, soybean oil, or sesame oil, or synthetic oils may be added. The liquid form of the pharmaceutical composition may further contain physiological saline solution, dextrose or other saccharide solution, or glycols such as ethylene glycol, propylene glycol or polyethylene glycol. When administered in liquid form, the pharmaceutical composition contains from about 0.5 to 90% by weight of protein or other active ingredient of the present invention, and preferably from about 1 to 50% protein or other active ingredient of the present invention.

[0281] When a therapeutically effective amount of protein or other active ingredient of the present invention is administered by intravenous, cutaneous or subcutaneous injection, protein or other active ingredient of the present invention will be in the form of a pyrogen-free, parenterally acceptable aqueous solution. The preparation of such parenterally acceptable protein or other active ingredient solutions, having due regard to pH, isotonicity, stability, and the like, is within the skill in the art. A preferred pharmaceutical composition for intravenous, cutaneous, or subcutaneous injection should contain, in addition to protein or other active ingredient of the present invention, an isotonic vehicle such as Sodium Chloride Injection, Ringer's Injection, Dextrose Injection, Dextrose and Sodium Chloride Injection, Lactated Ringer's Injection, or other vehicle as known in the art. The pharmaceutical composition of the present invention may also contain stabilizers, preservatives, buffers, antioxidants, or other additives known to those of skill in the art. For injection, the agents of the invention may be formulated in aqueous solutions, preferably in physiologically compatible buffers such as Hanks's solution, Ringer's solution, or physiological saline buffer. For transmucosal administration, penetrants appropriate to the barrier to be permeated are used in the formulation. Such penetrants are generally known in the art.

[0282] For oral administration, the compounds can be formulated readily by combining the active compounds with pharmaceutically acceptable carriers well known in the art. Such carriers enable the compounds of the invention to be formulated as tablets, pills, dragees, capsules, liquids, gels, syrups, slurries, suspensions and the like, for oral ingestion by a patient to be treated. Pharmaceutical preparations for oral use can be obtained from a solid excipient, optionally grinding a resulting mixture, and processing the mixture of granules, after adding suitable auxiliaries, if desired, to obtain tablets or dragee cores. Suitable excipients are, in particular, fillers such as sugars, including lactose, sucrose, mannitol, or sorbitol; cellulose preparations such as, for example, maize starch, wheat starch, rice starch, potato starch, gelatin, gum tragacanth, methyl cellulose, hydroxypropylmethyl-cellulose, sodium carboxymethylcellulose, and/or polyvinylpyrrolidone (PVP). If desired, disintegrating agents may be added, such as the cross-linked polyvinyl pyrrolidone, agar, or alginic acid or a salt thereof such as sodium alginate. Dragee cores are provided with suitable coatings. For this purpose, concentrated sugar solutions may be used, which may optionally contain gum arabic, talc, polyvinyl pyrrolidone, carbopol gel, polyethylene glycol, and/or titanium dioxide, lacquer solutions, and suitable organic solvents or solvent mixtures. Dyestuffs or pigments may be added to the tablets or dragee coatings for identification or to characterize different combinations of active compound doses.

[0283] Pharmaceutical preparations which can be used orally include push-fit capsules made of gelatin, as well as soft, sealed capsules made of gelatin and a plasticizer, such as glycerol or sorbitol. The push-fit capsules can contain the active ingredients in admixture with filler such as lactose, binders such as starches, and/or lubricants such as talc or magnesium stearate and, optionally, stabilizers. In soft capsules, the active compounds may be dissolved or suspended in suitable liquids, such as fatty oils, liquid paraffin, or liquid polyethylene glycols. In addition, stabilizers may be added. All formulations for oral administration should be in dosages suitable for such administration. For buccal administration, the compositions may take the form of tablets or lozenges formulated in conventional manner.

[0284] For administration by inhalation, the compounds for use according to the present invention are conveniently delivered in the form of an aerosol spray presentation from pressurized packs or a nebuliser, with the use of a suitable propellant, e.g., dichlorodifluoromethane, trichlorofluoromethane, dichlorotetrafluoroethane, carbon dioxide or other suitable gas. In the case of a pressurized aerosol the dosage unit may be determined by providing a valve to deliver a metered amount. Capsules and cartridges of, e.g., gelatin for use in an inhaler or insufflator may be formulated containing a powder mix of the compound and a suitable powder base such as lactose or starch. The compounds may be formulated for parenteral administration by injection, e.g., by bolus injection or continuous infusion. Formulations for injection may be presented in unit dosage form, e.g., in ampules or in multi-dose containers, with an added preservative. The compositions may take such forms as suspensions, solutions or emulsions in oily or aqueous vehicles, and may contain formulatory agents such as suspending, stabilizing and/or dispersing agents.

[0285] Pharmaceutical formulations for parenteral administration include aqueous solutions of the active compounds in water-soluble form. Additionally, suspensions of the active compounds may be prepared as appropriate oily injection suspensions. Suitable lipophilic solvents or vehicles include fatty oils such as sesame oil, or synthetic fatty acid esters, such as ethyl oleate or triglycerides, or liposomes. Aqueous injection suspensions may contain substances which increase the viscosity of the suspension, such as sodium carboxymethyl cellulose, sorbitol, or dextran. Optionally, the suspension may also contain suitable stabilizers or agents which increase the solubility of the compounds to allow for the preparation of highly concentrated solutions. Alternatively, the active ingredient may be in powder form for constitution with a suitable vehicle, e.g., sterile pyrogen-free water, before use.

[0286] The compounds may also be formulated in rectal compositions such as suppositories or retention enemas, e.g., containing conventional suppository bases such as cocoa butter or other glycerides. In addition to the formulations described previously, the compounds may also be formulated as a depot preparation. Such long acting formulations may be administered by implantation (for example subcutaneously or intramuscularly) or by intramuscular injection. Thus, for example, the compounds may be formulated with suitable polymeric or hydrophobic materials (for example as an emulsion in an acceptable oil) or ion exchange resins, or as sparingly soluble derivatives, for example, as a sparingly soluble salt.

[0287] A pharmaceutical carrier for the hydrophobic compounds of the invention is a co-solvent system comprising benzyl alcohol, a nonpolar surfactant, a water-miscible organic polymer, and an aqueous phase. The co-solvent system may be the VPD co-solvent system. VPD is a solution of 3% w/v benzyl alcohol, 8% w/v of the nonpolar surfactant polysorbate 80, and 65% w/v polyethylene glycol 300, made up to volume in absolute ethanol. The VPD co-solvent system (VPD:5W) consists of VPD diluted 1:1 with a 5% dextrose in water solution. This co-solvent system dissolves hydrophobic compounds well, and itself produces low toxicity upon systemic administration. Naturally, the proportions of a co-solvent system may be varied considerably without destroying its solubility and toxicity characteristics. Furthermore, the identity of the co-solvent components may be varied: for example, other low-toxicity nonpolar surfactants may be used instead of polysorbate 80; the fraction size of polyethylene glycol may be varied; other biocompatible polymers may replace polyethylene glycol, e.g. polyvinyl pyrrolidone; and other sugars or polysaccharides may substitute for dextrose. Alternatively, other delivery systems for hydrophobic pharmaceutical compounds may be employed. Liposomes and emulsions are well known examples of delivery vehicles or carriers for hydrophobic drugs. Certain organic solvents such as dimethylsulfoxide also maybe employed, although usually at the cost of greater toxicity. Additionally, the compounds may be delivered using a sustained-release system, such as semipermeable matrices of solid hydrophobic polymers containing the therapeutic agent. Various types of sustained-release materials have been established and are well known by those skilled in the art. Sustained-release capsules may, depending on their chemical nature, release the compounds for a few weeks up to over 100 days. Depending on the chemical nature and the biological stability of the therapeutic reagent, additional strategies for protein or other active ingredient stabilization may be employed.

[0288] The pharmaceutical compositions also may comprise suitable solid or gel phase carriers or excipients. Examples of such carriers or excipients include but are not limited to calcium carbonate, calcium phosphate, various sugars, starches, cellulose derivatives, gelatin, and polymers such as polyethylene glycols. Many of the active ingredients of the invention may be provided as salts with pharmaceutically compatible counter ions. Such pharmaceutically acceptable base addition salts are those salts which retain the biological effectiveness and properties of the free acids and which are obtained by reaction with inorganic or organic bases such as sodium hydroxide, magnesium hydroxide, ammonia, trialkylamine, dialkylamine, monoalkylamine, dibasic amino acids, sodium acetate, potassium benzoate, triethanol amine and the like.

[0289] The pharmaceutical composition of the invention may be in the form of a complex of the protein(s) or other active ingredient(s) of present invention along with protein or peptide antigens. The protein and/or peptide antigen will deliver a stimulatory signal to both B and T lymphocytes. B lymphocytes will respond to antigen through their surface immunoglobulin receptor. T lymphocytes will respond to antigen through the T cell receptor (TCR) following presentation of the antigen by MHC proteins. MHC and structurally related proteins including those encoded by class I and class II MHC genes on host cells will serve to present the peptide antigen(s) to T lymphocytes. The antigen components could also be supplied as purified MHC-peptide complexes alone or with co-stimulatory molecules that can directly signal T cells. Alternatively antibodies able to bind surface immunoglobulin and other molecules on B cells as well as antibodies able to bind the TCR and other molecules on T cells can be combined with the pharmaceutical composition of the invention.

[0290] The pharmaceutical composition of the invention may be in the form of a liposome in which protein of the present invention is combined, in addition to other pharmaceutically acceptable carriers, with amphipathic agents such as lipids which exist in aggregated form as micelles, insoluble monolayers, liquid crystals, or lamellar layers in aqueous solution. Suitable lipids for liposomal formulation include, without limitation, monoglycerides, diglycerides, sulfatides, lysolecithins, phospholipids, saponin, bile acids, and the like. Preparation of such liposomal formulations is within the level of skill in the art, as disclosed, for example, in U.S. Pat. Nos. 4,235,871; 4,501,728; 4,837,028; and 4,737,323, all of which are incorporated herein by reference.

[0291] The amount of protein or other active ingredient of the present invention in the pharmaceutical composition of the present invention will depend upon the nature and severity of the condition being treated, and on the nature of prior treatments which the patient has undergone. Ultimately, the attending physician will decide the amount of protein or other active ingredient of the present invention with which to treat each individual patient. Initially, the attending physician will administer low doses of protein or other active ingredient of the present invention and observe the patient's response. Larger doses of protein or other active ingredient of the present invention may be administered until the optimal therapeutic effect is obtained for the patient, and at that point the dosage is not increased further. It is contemplated that the various pharmaceutical compositions used to practice the method of the present invention should contain about 0.01 μg to about 100 mg (preferably about 0.1 μg to about 10 mg, more preferably about 0.1 μg to about 1 mg) of protein or other active ingredient of the present invention per kg body weight. For compositions of the present invention which are useful for bone, cartilage, tendon or ligament regeneration, the therapeutic method includes administering the composition topically, systematically, or locally as an implant or device. When administered, the therapeutic composition for use in this invention is, of course, in a pyrogen-free, physiologically acceptable form. Further, the composition may desirably be encapsulated or injected in a viscous form for delivery to the site of bone, cartilage or tissue damage. Topical administration may be suitable for wound healing and tissue repair. Therapeutically useful agents other than a protein or other active ingredient of the invention which may also optionally be included in the composition as described above, may alternatively or additionally, be administered simultaneously or sequentially with the composition in the methods of the invention. Preferably for bone and/or cartilage formation, the composition would include a matrix capable of delivering the protein-containing or other active ingredient-containing composition to the site of bone and/or cartilage damage, providing a structure for the developing bone and cartilage and optimally capable of being resorbed into the body. Such matrices may be formed of materials presently in use for other implanted medical applications.

[0292] The choice of matrix material is based on biocompatibility, biodegradability, mechanical properties, cosmetic appearance and interface properties. The particular application of the compositions will define the appropriate formulation. Potential matrices for the compositions may be biodegradable and chemically defined calcium sulfate, tricalcium phosphate, hydroxyapatite, polylactic acid, polyglycolic acid and polyanhydrides. Other potential materials are biodegradable and biologically well-defined, such as bone or dermal collagen. Further matrices are comprised of pure proteins or extracellular matrix components. Other potential matrices are nonbiodegradable and chemically defined, such as sintered hydroxyapatite, bioglass, aluminates, or other ceramics. Matrices may be comprised of combinations of any of the above mentioned types of material, such as polylactic acid and hydroxyapatite or collagen and tricalcium phosphate. The bioceramics may be altered in composition, such as in calcium-aluminate-phosphate and processing to alter pore size, particle size, particle shape, and biodegradability. Presently preferred is a 50:50 (mole weight) copolymer of lactic acid and glycolic acid in the form of porous particles having diameters ranging from 150 to 800 microns. In some applications, it will be useful to utilize a sequestering agent, such as carboxymethyl cellulose or autologous blood clot, to prevent the protein compositions from disassociating from the matrix.

[0293] A preferred family of sequestering agents is cellulosic materials such as alkylcelluloses (including hydroxyalkylcelluloses), including methylcellulose, ethylcellulose, hydroxyethylcellulose, hydroxypropylcellulose, hydroxypropyl-methylcellulose, and carboxymethylcellulose, the most preferred being cationic salts of carboxymethylcellulose (CMC). Other preferred sequestering agents include hyaluronic acid, sodium alginate, poly(ethylene glycol), polyoxyethylene oxide, carboxyvinyl polymer and poly(vinyl alcohol). The amount of sequestering agent useful herein is 0.5-20 wt %, preferably 1-10 wt % based on total formulation weight, which represents the amount necessary to prevent desorption of the protein from the polymer matrix and to provide appropriate handling of the composition, yet not so much that the progenitor cells are prevented from infiltrating the matrix, thereby providing the protein the opportunity to assist the osteogenic activity of the progenitor cells. In further compositions, proteins or other active ingredients of the invention may be combined with other agents beneficial to the treatment of the bone and/or cartilage defect, wound, or tissue in question. These agents include various growth factors such as epidermal growth factor (EGF), platelet derived growth factor (PDGF), transforming growth factors (TGF-α and TGF-β), and insulin-like growth factor (IGF).

[0294] The therapeutic compositions are also presently valuable for veterinary applications. Particularly domestic animals and thoroughbred horses, in addition to humans, are desired patients for such treatment with proteins or other active ingredients of the present invention. The dosage regimen of a protein-containing pharmaceutical composition to be used in tissue regeneration will be determined by the attending physician considering various factors which modify the action of the proteins, e.g., amount of tissue weight desired to be formed, the site of damage, the condition of the damaged tissue, the size of a wound, type of damaged tissue (e.g., bone), the patient's age, sex, and diet, the severity of any infection, time of administration and other clinical factors. The dosage may vary with the type of matrix used in the reconstitution and with inclusion of other proteins in the pharmaceutical composition. For example, the addition of other known growth factors, such as IGF 1 (insulin like growth factor I), to the final composition, may also effect the dosage. Progress can be monitored by periodic assessment of tissue/bone growth and/or repair, for example, X-rays, histomorphometric determinations and tetracycline labeling.

[0295] Polynucleotides of the present invention can also be used for gene therapy. Such polynucleotides can be introduced either in vivo or ex vivo into cells for expression in a mammalian subject. Polynucleotides of the invention may also be administered by other known methods for introduction of nucleic acid into a cell or organism (including, without limitation, in the form of viral vectors or naked DNA). Cells may also be cultured ex vivo in the presence of proteins of the present invention in order to proliferate or to produce a desired effect on or activity in such cells. Treated cells can then be introduced in vivo for therapeutic purposes.

[0296] 4.9.3 Effective Dosage

[0297] Pharmaceutical compositions suitable for use in the present invention include compositions wherein the active ingredients are contained in an effective amount to achieve its intended purpose. More specifically, a therapeutically effective amount means an amount effective to prevent development of or to alleviate the existing symptoms of the subject being treated. Determination of the effective amount is well within the capability of those skilled in the art, especially in light of the detailed disclosure provided herein. For any compound used in the method of the invention, the therapeutically effective dose can be estimated initially from appropriate in vitro assays. For example, a dose can be formulated in animal models to achieve a circulating concentration range that can be used to more accurately determine useful doses in humans. For example, a dose can be formulated in animal models to achieve a circulating concentration range that includes the IC₅₀ as determined in cell culture (i.e., the concentration of the test compound which achieves a half-maximal inhibition of the protein's biological activity). Such information can be used to more accurately determine useful doses in humans.

[0298] A therapeutically effective dose refers to that amount of the compound that results in amelioration of symptoms or a prolongation of survival in a patient. Toxicity and therapeutic efficacy of such compounds can be determined by standard pharmaceutical procedures in cell cultures or experimental animals, e.g., for determining the LD₅₀ (the dose lethal to 50% of the population) and the ED₅₀ (the dose therapeutically effective in 50% of the population). The dose ratio between toxic and therapeutic effects is the therapeutic index and it can be expressed as the ratio between LD₅₀ and ED₅₀. Compounds which exhibit high therapeutic indices are preferred. The data obtained from these cell culture assays and animal studies can be used in formulating a range of dosage for use in human. The dosage of such compounds lies preferably within a range of circulating concentrations that include the ED₅₀ with little or no toxicity. The dosage may vary within this range depending upon the dosage form employed and the route of administration utilized. The exact formulation, route of administration and dosage can be chosen by the individual physician in view of the patient's condition. See, e.g., Fingl et al., 1975, in “The Pharmacological Basis of Therapeutics”, Ch. 1 p.1. Dosage amount and interval may be adjusted individually to provide plasma levels of the active moiety which are sufficient to maintain the desired effects, or minimal effective concentration (MEC). The MEC will vary for each compound but can be estimated from in vitro data. Dosages necessary to achieve the MEC will depend on individual characteristics and route of administration. However, HPLC assays or bioassays can be used to determine plasma concentrations.

[0299] Dosage intervals can also be determined using MEC value. Compounds should be administered using a regimen which maintains plasma levels above the MEC for 10-90% of the time, preferably between 30-90% and most preferably between 50-90%. In cases of local administration or selective uptake, the effective local concentration of the drug may not be related to plasma concentration.

[0300] An exemplary dosage regimen for polypeptides or other compositions of the invention will be in the range of about 0.01 μg/kg to 100 mg/kg of body weight daily, with the preferred dose being about 0.1 μg/kg to 25 mg/kg of patient body weight daily, varying in adults and children. Dosing may be once daily, or equivalent doses may be delivered at longer or shorter intervals.

[0301] The amount of composition administered will, of course, be dependent on the subject being treated, on the subject's age and weight, the severity of the affliction, the manner of administration and the judgment of the prescribing physician.

[0302] 4.9.4 Packaging

[0303] The compositions may, if desired, be presented in a pack or dispenser device which may contain one or more unit dosage forms containing the active ingredient. The pack may, for example, comprise metal or plastic foil, such as a blister pack. The pack or dispenser device may be accompanied by instructions for administration. Compositions comprising a compound of the invention formulated in a compatible pharmaceutical carrier may also be prepared, placed in an appropriate container, and labeled for treatment of an indicated condition.

[0304] 4.10 Antibodies

[0305] Another aspect of the invention is an antibody that specifically binds the polypeptide of the invention. Such antibodies include monoclonal and polyclonal antibodies, single chain antibodies, chimeric antibodies, bifunctional/bispecific antibodies, humanized antibodies, human antibodies, and complementary determining region (CDR)-grafted antibodies, including compounds which include CDR and/or antigen-binding sequences, which specifically recognize a polypeptide of the invention. Preferred antibodies of the invention are human antibodies which are produced and identified according to methods described in WO93/11236, published Jun. 20, 1993, which is incorporated herein by reference in its entirety. Antibody fragments, including Fab, Fab′, F(ab′)₂, and Fᵥ, are also provided by the invention. The term “specific for” indicates that the variable regions of the antibodies of the invention recognize and bind polypeptides of the invention exclusively (i.e., able to distinguish the polypeptide of the invention from other similar polypeptides despite sequence identity, homology, or similarity found in the family of polypeptides), but may also interact with other proteins (for example, S. aureus protein A or other antibodies in ELISA techniques) through interactions with sequences outside the variable region of the antibodies, and in particular, in the constant region of the molecule. Screening assays to determine binding specificity of an antibody of the invention are well known and routinely practiced in the art. For a comprehensive discussion of such assays, see Harlow et al. (Eds), Antibodies A Laboratory Manual; Cold Spring Harbor Laboratory; Cold Spring Harbor, N.Y. (1988), Chapter 6. Antibodies that recognize and bind fragments of the polypeptides of the invention are also contemplated, provided that the antibodies are first and foremost specific for, as defined above, full length polypeptides of the invention. As with antibodies that are specific for full length polypeptides of the invention, antibodies of the invention that recognize fragments are those which can distinguish polypeptides from the same family of polypeptides despite inherent sequence identity, homology, or similarity found in the family of proteins. Antibodies of the invention can be produced using any method well known and routinely practiced in the art.

[0306] Non-human antibodies may be humanized by any methods known in the art. In one method, the non-human CDRs are inserted into a human antibody or consensus antibody framework sequence. Further changes can then be introduced into the antibody framework to modulate affinity or immunogenicity.

[0307] Antibodies of the invention are useful for, for example, therapeutic purposes (by modulating activity of a polypeptide of the invention), diagnostic purposes to detect or quantitate a polypeptide of the invention, as well as purification of a polypeptide of the invention. Kits comprising an antibody of the invention for any of the purposes described herein are also comprehended. In general, a kit of the invention also includes a control antigen for which the antibody is immunospecific. The invention further provides a hybridoma that produces an antibody according to the invention. Antibodies of the invention are useful for detection and/or purification of the polypeptides of the invention.

[0308] Polypeptides of the invention may also be used to immunize animals to obtain polyclonal and monoclonal antibodies which specifically react with the protein. Such antibodies may be obtained using either the entire protein or fragments thereof as an immunogen. The peptide immunogens additionally may contain a cysteine residue at the carboxyl terminus, and are conjugated to a hapten such as keyhole limpet hemocyanin (KLH). Methods for synthesizing such peptides are known in the art, for example, as in R. P. Merrifield, J. Amer. Chem. Soc. 85, 2149-2154 (1963); J. L. Krstenansky, et al., FEBS Lett. 211, 10 (1987).

[0309] Monoclonal antibodies binding to the protein of the invention may be useful diagnostic agents for the immunodetection of the protein. Neutralizing monoclonal antibodies binding to the protein may also be useful therapeutics for both conditions associated with the protein and also in the treatment of some forms of cancer where abnormal expression of the protein is involved. In the case of cancerous cells or leukemic cells, neutralizing monoclonal antibodies against the protein may be useful in detecting and preventing the metastatic spread of the cancerous cells, which may be mediated by the protein. In general, techniques for preparing polyclonal and monoclonal antibodies as well as hybridomas capable of producing the desired antibody are well known in the art (Campbell, A. M., Monoclonal Antibodies Technology: Laboratory Techniques in Biochemistry and Molecular Biology, Elsevier Science Publishers, Amsterdam, The Netherlands (1984); St. Groth et al., J. Immunol. 35:1-21 (1990); Kohler and Milstein, Nature 256:495-497 (1975)), the trioma technique, the human B-cell hybridoma technique (Kozbor et al., Immunology Today 4:72 (1983); Cole et al., in Monoclonal Antibodies and Cancer Therapy, Alan R. Liss, Inc. (1985), pp. 77-96).

[0310] Any animal (mouse, rabbit, etc.) which is known to produce antibodies can be immunized with a peptide or polypeptide of the invention. Methods for immunization are well known in the art. Such methods include subcutaneous or intraperitoneal injection of the polypeptide. One skilled in the art will recognize that the amount of the protein encoded by the ORF of the present invention used for immunization will vary based on the animal which is immunized, the antigenicity of the peptide and the site of injection. The protein that is used as an immunogen may be modified or administered in an adjuvant in order to increase the protein's antigenicity. Methods of increasing the antigenicity of a protein are well known in the art and include, but are not limited to, coupling the antigen with a heterologous protein (such as globulin or β-galactosidase) or through the inclusion of an adjuvant during immunization.

[0311] For monoclonal antibodies, spleen cells from the immunized animals are removed, fused with myeloma cells, such as SP2/0-Ag14 myeloma cells, and allowed to become monoclonal antibody producing hybridoma cells. Any one of a number of methods well known in the art can be used to identify the hybridoma cell which produces an antibody with the desired characteristics. These include screening the hybridomas with an ELISA assay, Western blot analysis, or radioimmunoassay (Lutz et al., Exp. Cell Research. 175:109-124 (1988)). Hybridomas secreting the desired antibodies are cloned and the class and subclass is determined using procedures known in the art (Campbell, A. M., Monoclonal Antibody Technology: Laboratory Techniques in Biochemistry and Molecular Biology, Elsevier Science Publishers, Amsterdam, The Netherlands (1984)). Techniques described for the production of single chain antibodies (U.S. Pat. No. 4,946,778) can be adapted to produce single chain antibodies to proteins of the present invention.

[0312] For polyclonal antibodies, antibody-containing antiserum is isolated from the immunized animal and is screened for the presence of antibodies with the desired specificity using one of the above-described procedures. The present invention further provides the above-described antibodies in delectably labeled form. Antibodies can be delectably labeled through the use of radioisotopes, affinity labels (such as biotin, avidin, etc.), enzymatic labels (such as horseradish peroxidase, alkaline phosphatase, etc.) fluorescent labels (such as FITC or rhodamine, etc.), paramagnetic atoms, etc. Procedures for accomplishing such labeling are well-known in the art, for example, see (Sternberger, L. A. et al., J. Histochem. Cytochem. 18:315 (1970); Bayer, E. A. et al., Meth. Enzym. 62:308 (1979); Engval, E. et al., Immunol. 109:129 (1972); Goding, J.W. J. Immunol. Meth. 13:215 (1976)).

[0313] The labeled antibodies of the present invention can be used for in vitro, in vivo, and in situ assays to identify cells or tissues in which a fragment of the polypeptide of interest is expressed. The antibodies may also be used directly in therapies or other diagnostics. The present invention further provides the above-described antibodies immobilized on a solid support. Examples of such solid supports include plastics such as polycarbonate, complex carbohydrates such as agarose and Sepharose®, acrylic resins and such as polyacrylamide and latex beads. Techniques for coupling antibodies to such solid supports are well known in the art (Weir, D. M. et al., “Handbook of Experimental Immunology” 4th Ed., Blackwell Scientific Publications, Oxford, England, Chapter 10 (1986); Jacoby, W. D. et al., Meth. Enzym. 34 Academic Press, N.Y. (1974)). The immobilized antibodies of the present invention can be used for in vitro, in vivo, and in situ assays as well as for immuno-affinity purification of the proteins of the present invention.

[0314] 4.11 Computer Readable Sequences

[0315] In one application of this embodiment, a nucleotide sequence of the present invention can be recorded on computer readable media. As used herein, “computer readable media” refers to any medium which can be read and accessed directly by a computer. Such media include, but are not limited to: magnetic storage media, such as floppy discs, hard disc storage medium, and magnetic tape; optical storage media such as CD-ROM; electrical storage media such as RAM and ROM; and hybrids of these categories such as magnetic/optical storage media. A skilled artisan can readily appreciate how any of the presently known computer readable mediums can be used to create a manufacture comprising computer readable medium having recorded thereon a nucleotide sequence of the present invention. As used herein, “recorded” refers to a process for storing information on computer readable medium. A skilled artisan can readily adopt any of the presently known methods for recording information on computer readable medium to generate manufactures comprising the nucleotide sequence information of the present invention.

[0316] A variety of data storage structures are available to a skilled artisan for creating a computer readable medium having recorded thereon a nucleotide sequence of the present invention. The choice of the data storage structure will generally be based on the means chosen to access the stored information. In addition, a variety of data processor programs and formats can be used to store the nucleotide sequence information of the present invention on computer readable medium. The sequence information can be represented in a word processing text file, formatted in commercially-available software such as WordPerfect and Microsoft Word, or represented in the form of an ASCll file, stored in a database application, such as DB2, Sybase, Oracle, or the like. A skilled artisan can readily adapt any number of data processor structuring formats (e.g. text file or database) in order to obtain computer readable medium having recorded thereon the nucleotide sequence information of the present invention.

[0317] By providing any of the nucleotide sequences SEQ ID NOs: 1-178 or a representative fragment thereof; or a nucleotide sequence at least 95% identical to any of the nucleotide sequences of SEQ ID NOs: 1-178 in computer readable form, a skilled artisan can routinely access the sequence information for a variety of purposes. Computer software is publicly available which allows a skilled artisan to access sequence information provided in a computer readable medium. The examples which follow demonstrate how software which implements the BLAST (Altschul et al., J. Mol. Biol. 215:403-410 (1990)) and BLAZE (Brutlag et al., Comp. Chem. 17:203-207 (1993)) search algorithms on a Sybase system is used to identify open reading frames (ORFs) within a nucleic acid-sequence. Such ORFs may be protein encoding fragments and may be useful in producing commercially important proteins such as enzymes used in fermentation reactions and in the production of commercially useful metabolites.

[0318] As used herein, “a computer-based system” refers to the hardware means, software means, and data storage means used to analyze the nucleotide sequence information of the present invention. The minimum hardware means of the computer-based systems of the present invention comprises a central processing unit (CPU), input means, output means, and data storage means. A skilled artisan can readily appreciate that any one of the currently available computer-based systems are suitable for use in the present invention. As stated above, the computer-based systems of the present invention comprise a data storage means having stored therein a nucleotide sequence of the present invention and the necessary hardware means and software means for supporting and implementing a search means. As used herein, “data storage means” refers to memory which can store nucleotide sequence information of the present invention, or a memory access means which can access manufactures having recorded thereon the nucleotide sequence information of the present invention.

[0319] As used herein, “search means” refers to one or more programs which are implemented on the computer-based system to compare a target sequence or target structural motif with the sequence information stored within the data storage means. Search means are used to identify fragments or regions of a known sequence which match a particular target sequence or target motif. A variety of known algorithms are disclosed publicly and a variety of commercially available software for conducting search means are and can be used in the computer-based systems of the present invention. Examples of such software includes, but is not limited to, Smith-Waterman, MacPattern (EMBL), BLASTN and BLASTA (NPOLYPEPTIDEIA). A skilled artisan can readily recognize that any one of the available algorithms or implementing software packages for conducting homology searches can be adapted for use in the present computer-based systems. As used herein, a “target sequence” can be any nucleic acid or amino acid sequence of six or more nucleotides or two or more amino acids. A skilled artisan can readily recognize that the longer a target sequence is, the less likely a target sequence will be present as a random occurrence in the database. The most preferred sequence length of a target sequence is from about 10 to 300 amino acids, more preferably from about 30 to 100 nucleotide residues. However, it is well recognized that searches for commercially important fragments, such as sequence fragments involved in gene expression and protein processing, may be of shorter length.

[0320] As used herein, “a target structural motif,” or “target motif,” refers to any rationally selected sequence or combination of sequences in which the sequence(s) are chosen based on a three-dimensional configuration which is formed upon the folding of the target motif. There are a variety of target motifs known in the art. Protein target motifs include, but are not limited to, enzyme active sites and signal sequences. Nucleic acid target motifs include, but are not limited to, promoter sequences, hairpin structures and inducible expression elements (protein binding sequences).

[0321] 4.12 Triple Helix Formation

[0322] In addition, the fragments of the present invention, as broadly described, can be used to control gene expression through triple helix formation or antisense DNA or RNA, both of which methods are based on the binding of a polynucleotide sequence to DNA or RNA. Polynucleotides suitable for use in these methods are preferably 20 to 40 bases in length and are designed to be complementary to a region of the gene involved in transcription (triple helix—see Lee et al., Nucl. Acids Res. 6:3073 (1979); Cooney et al., Science 15241:456 (1988); and Dervan et al., Science 251:1360 (1991)) or to the mRNA itself (antisense—Olmno, J. Neurochem. 56:560 (1991); Oligodeoxynucleotides as Antisense Inhibitors of Gene Expression, CRC Press, Boca Raton, Fla. (1988)). Triple helix-formation optimally results in a shut-off of RNA transcription from DNA, while antisense RNA hybridization blocks translation of an mRNA molecule into polypeptide. Both techniques have been demonstrated to be effective in model systems. Information contained in the sequences of the present invention is necessary for the design of an antisense or triple helix oligonucleotide.

[0323] 4.13 Diagnostic Assays and Kits

[0324] The present invention further provides methods to identify the presence or expression of one of the ORFs of the present invention, or homolog thereof, in a test sample, using a nucleic acid probe or antibodies of the present invention, optionally conjugated or otherwise associated with a suitable label.

[0325] In general, methods for detecting a polynucleotide of the invention can comprise contacting a sample with a compound that binds to and forms a complex with the polynucleotide for a period sufficient to form the complex, and detecting the complex, so that if a complex is detected, a polynucleotide of the invention is detected in the sample. Such methods can also comprise contacting a sample under stringent hybridization conditions with nucleic acid primers that anneal to a polynucleotide of the invention under such conditions, and amplifying annealed polynucleotides, so that if a polynucleotide is amplified, a polynucleotide of the invention is detected in the sample.

[0326] In general, methods for detecting a polypeptide of the invention can comprise contacting a sample with a compound that binds to and forms a complex with the polypeptide for a period sufficient to form the complex, and detecting the complex, so that if a complex is detected, a polypeptide of the invention is detected in the sample.

[0327] In detail, such methods comprise incubating a test sample with one or more of the antibodies or one or more of the nucleic acid probes of the present invention and assaying for binding of the nucleic acid probes or antibodies to components within the test sample.

[0328] Conditions for incubating a nucleic acid probe or antibody with a test sample vary. Incubation conditions depend on the format employed in the assay, the detection methods employed, and the type and nature of the nucleic acid probe or antibody used in the assay. One skilled in the art will recognize that any one of the commonly available hybridization, amplification or immunological assay formats can readily be adapted to employ the nucleic acid probes or antibodies of the present invention. Examples of such assays can be found in Chard, T., An Introduction to Radioimmunoassay and Related Techniques, Elsevier Science Publishers, Amsterdam, The Netherlands (1986); Bullock, G. R. et al., Techniques in Immunocytochemistry, Academic Press, Orlando, Fla. Vol. 1 (1982), Vol. 2 (1983), Vol. 3 (1985); Tijssen, P., Practice and Theory of immunoassays: Laboratory Techniques in Biochemistry and Molecular Biology, Elsevier Science Publishers, Amsterdam, The Netherlands (1985). The test samples of the present invention include cells, protein or membrane extracts of cells, or biological fluids such as sputum, blood, serum, plasma, or urine. The test sample used in the above-described method will vary based on the assay format, nature of the detection method and the tissues, cells or extracts used as the sample to be assayed. Methods for preparing protein extracts or membrane extracts of cells are well known in the art and can be readily be adapted in order to obtain a sample which is compatible with the system utilized.

[0329] In another embodiment of the present invention, kits are provided which contain the necessary reagents to carry out the assays of the present invention. Specifically, the invention provides a compartment kit to receive, in close confinement, one or more containers which comprises: (a) a first container comprising one of the probes or antibodies of the present invention; and (b) one or more other containers comprising one or more of the following: wash reagents, reagents capable of detecting presence of a bound probe or antibody.

[0330] In detail, a compartment kit includes any kit in which reagents are contained in separate containers. Such containers include small glass containers, plastic containers or strips of plastic or paper. Such containers allows one to efficiently transfer reagents from one compartment to another compartment such that the samples and reagents are not cross-contaminated, and the agents or solutions of each container can be added in a quantitative fashion from one compartment to another. Such containers will include a container which will accept the test sample, a container which contains the antibodies used in the assay, containers which contain wash reagents (such as phosphate buffered saline, Tris-buffers, etc.), and containers which contain the reagents used to detect the bound antibody or probe. Types of detection reagents include labeled nucleic acid probes, labeled secondary antibodies, or in the alternative, if the primary antibody is labeled, the enzymatic, or antibody binding reagents which are capable of reacting with the labeled antibody. One skilled in the art will readily recognize that the disclosed probes and antibodies of the present invention can be readily incorporated into one of the established kit formats which are well known in the art.

[0331] 4.14 Medical Imaging

[0332] The novel polypeptides and binding partners of the invention are useful in medical imaging of sites expressing the molecules of the invention (e.g., where the polypeptide of the invention is involved in the immune response, for imaging sites of inflammation or infection). See, e.g., Kunkel et al., U.S. Pat. No. 5,413,778. Such methods involve chemical attachment of a labeling or imaging agent, administration of the labeled polypeptide to a subject in a pharmaceutically acceptable carrier, and imaging the labeled polypeptide in vivo at the target site.

[0333] 4.15 Screening Assays

[0334] Using the isolated proteins and polynucleotides of the invention, the present invention further provides methods of obtaining and identifying agents which bind to a polypeptide encoded by an ORF corresponding to any of the nucleotide sequences set forth in SEQ ID NOs: 1-178, or bind to a specific domain of the polypeptide encoded by the nucleic acid. In detail, said method comprises the steps of:

[0335] (a) contacting an agent with an isolated protein encoded by an ORF of the present invention, or nucleic acid of the invention; and

[0336] (b) determining whether the agent binds to said protein or said nucleic acid.

[0337] In general, therefore, such methods for identifying compounds that bind to a polynucleotide of the invention can comprise contacting a compound with a polynucleotide of the invention for a time sufficient to form a polynucleotide/compound complex, and detecting the complex, so that if a polynucleotide/compound complex is detected, a compound that binds to a polynucleotide of the invention is identified.

[0338] Likewise, in general, therefore, such methods for identifying compounds that bind to a polypeptide of the invention can comprise contacting a compound with a polypeptide of the invention for a time sufficient to form a polypeptide/compound complex, and detecting the complex, so that if a polypeptide/compound complex is detected, a compound that binds to a polynucleotide of the invention is identified.

[0339] Methods for identifying compounds that bind to a polypeptide of the invention can also comprise contacting a compound with a polypeptide of the invention in a cell for a time sufficient to form a polypeptide/compound complex, wherein the complex drives expression of a receptor gene sequence in the cell, and detecting the complex by detecting reporter gene sequence expression, so that if a polypeptide/compound complex is detected, a compound that binds a polypeptide of the invention is identified.

[0340] Compounds identified via such methods can include compounds which modulate the activity of a polypeptide of the invention (that is, increase or decrease its activity, relative to activity observed in the absence of the compound). Alternatively, compounds identified via such methods can include compounds which modulate the expression of a polynucleotide of the invention (that is, increase or decrease expression relative to expression levels observed in the absence of the compound). Compounds, such as compounds identified via the methods of the invention, can be tested using standard assays well known to those of skill in the art for their ability to modulate activity/expression.

[0341] The agents screened in the above assay can be, but are not limited to, peptides, carbohydrates, vitamin derivatives, or other pharmaceutical agents. The agents can be selected and screened at random or rationally selected or designed using protein modeling techniques.

[0342] For random screening, agents such as peptides, carbohydrates, pharmaceutical agents and the like are selected at random and are assayed for their ability to bind to the protein encoded by the ORF of the present invention. Alternatively, agents may be rationally selected or designed. As used herein, an agent is said to be “rationally selected or designed” when the agent is chosen based on the configuration of the particular protein. For example, one skilled in the art can readily adapt currently available procedures to generate peptides, pharmaceutical agents and the like, capable of binding to a specific peptide sequence, in order to generate rationally designed antipeptide peptides, for example see Hurby et al., Application of Synthetic Peptides: Antisense Peptides,” In Synthetic Peptides, A User's Guide, W. H. Freeman, New York (1992), pp. 289-307, and Kaspczak et al., Biochemistry 28:9230-8 (1989), or pharmaceutical agents, or the like.

[0343] In addition to the foregoing, one class of agents of the present invention, as broadly described, can be used to control gene expression through binding to one of the ORFs or EMFs of the present invention. As described above, such agents can be randomly screened or rationally designed/selected. Targeting the ORF or EMF allows a skilled artisan to design sequence specific or element specific agents, modulating the expression of either a single ORF or multiple ORFs which rely on the same EMF for expression control. One class of DNA binding agents are agents which contain base residues which hybridize or form a triple helix formation by binding to DNA or RNA. Such agents can be based on the classic phosphodiester, ribonucleic acid backbone, or can be a variety of sulfhydryl or polymeric derivatives which have base attachment capacity.

[0344] Agents suitable for use in these methods preferably contain 20 to 40 bases and are designed to be complementary to a region of the gene involved in transcription (triple helix—see Lee et al., Nucl. Acids Res. 6:3073 (1979); Cooney et al., Science 241:456 (1988); and Dervan et al., Science 251:1360 (1991)) or to the mRNA itself (antisense—Okano, J. Neurochem. 56:560 (1991); Oligodeoxynucleotides as Antisense Inhibitors of Gene Expression, CRC Press, Boca Raton, Fla. (1988)). Triple helix-formation optimally results in a shut-off of RNA transcription from DNA, while antisense RNA hybridization blocks translation of an mRNA molecule into polypeptide. Both techniques have been demonstrated to be effective in model systems. Information contained in the sequences of the present invention is necessary for the design of an antisense or triple helix oligonucleotide and other DNA binding agents.

[0345] Agents which bind to a protein encoded by one of the ORFs of the present invention can be used as a diagnostic agent. Agents which bind to a protein encoded by one of the ORFs of the present invention can be formulated using known techniques to generate a pharmaceutical composition.

[0346] 4.16 Use of Nucleic Acids as Probes

[0347] Another aspect of the subject invention is to provide for polypeptide-specific nucleic acid hybridization probes capable of hybridizing with naturally occurring nucleotide sequences. The hybridization probes of the subject invention may be derived from any of the nucleotide sequences SEQ ID NOs: 1-178. Because the corresponding gene is only expressed in a limited number of tissues, a hybridization probe derived from of any of the nucleotide sequences SEQ ID NOs: 1-178 can be used as an indicator of the presence of RNA of cell type of such a tissue in a sample.

[0348] Any suitable hybridization technique can be employed, such as, for example, in situ hybridization. PCR as described in U.S. Pat. Nos. 4,683,195 and 4,965,188 provides additional uses for oligonucleotides based upon the nucleotide sequences. Such probes used in PCR may be of recombinant origin, may be chemically synthesized, or a mixture of both. The probe will comprise a discrete nucleotide sequence for the detection of identical sequences or a degenerate pool of possible sequences for identification of closely related genomic sequences.

[0349] Other means for producing specific hybridization probes for nucleic acids include the cloning of nucleic acid sequences into vectors for the production of mRNA probes. Such vectors are known in the art and are commercially available and may be used to synthesize RNA probes in vitro by means of the addition of the appropriate RNA polymerase as T7 or SP6 RNA polymerase and the appropriate radioactively labeled nucleotides. The nucleotide sequences may be used to construct hybridization probes for mapping their respective genomic sequences. The nucleotide sequence provided herein may be mapped to a chromosome or specific regions of a chromosome using well known genetic and/or chromosomal mapping techniques. These techniques include in situ hybridization, linkage analysis against known chromosomal markers, hybridization screening with libraries or flow-sorted chromosomal preparations specific to known chromosomes, and the like. The technique of fluorescent in situ hybridization of chromosome spreads has been described, among other places, in Verma et al (1988) Human Chromosomes: A Manual of Basic Techniques, Pergamon Press, New York N.Y.

[0350] Fluorescent in situ hybridization of chromosomal preparations and other physical chromosome mapping techniques may be correlated with additional genetic map data. Examples of genetic map data can be found in the 1994 Genome Issue of Science (265:1981 f). Correlation between the location of a nucleic acid on a physical chromosomal map and a specific disease (or predisposition to a specific disease) may help delimit the region of DNA associated with that genetic disease. The nucleotide sequences of the subject invention may be used to detect differences in gene sequences between normal, carrier or affected individuals.

[0351] 4.17 Preparation of Support Bound Oligonucleotides

[0352] Oligonucleotides, i.e., small nucleic acid segments, may be readily prepared by, for example, directly synthesizing the oligonucleotide by chemical means, as is commonly practiced using an automated oligonucleotide synthesizer.

[0353] Support bound oligonucleotides may be prepared by any of the methods known to those of skill in the art using any suitable support such as glass, polystyrene or Teflon. One strategy is to precisely spot oligonucleotides synthesized by standard synthesizers. Immobilization can be achieved using passive adsorption (Inouye & Hondo, (1990) J. Clin. Microbiol. 28(6) 1469-72); using UV light (Nagata et al., 1985; Dahlen et al., 1987; Morrissey & Collins, (1989) Mol. Cell Probes 3(2) 189-207) or by covalent binding of base modified DNA (Keller et al., 1988; 1989); all references being specifically incorporated herein.

[0354] Another strategy that may be employed is the use of the strong biotin-streptavidin interaction as a linker. For example, Broude et al. (1994) Proc. Natl. Acad. Sci. USA 91(8) 3072-6, describe the use of biotinylated probes, although these are duplex probes, that are immobilized on streptavidin-coated magnetic beads. Streptavidin-coated beads may be purchased from Dynal, Oslo. Of course, this same linking chemistry is applicable to coating any surface with streptavidin. Biotinylated probes may be purchased from various sources, such as, e.g., Operon Technologies (Alameda, Calif.).

[0355] Nunc Laboratories (Naperville, Ill.) is also selling suitable material that could be used. Nunc Laboratories have developed a method by which DNA can be covalently bound to the microwell surface termed Covalink NH. CovaLink NH is a polystyrene surface grafted with secondary amino groups (>NH) that serve as bridge-heads for further covalent coupling. CovaLink Modules may be purchased from Nunc Laboratories. DNA molecules may be bound to CovaLink exclusively at the 5′-end by a phosphoramidate bond, allowing immobilization of more than 1 pmol of DNA (Rasmussen et al., (1991) Anal. Biochem. 198(1) 138-42).

[0356] The use of CovaLink NH strips for covalent binding of DNA molecules at the 5′-end has been described (Rasmussen et al., (1991). In this technology, a phosphoramidate bond is employed (Chu et al., (1983) Nucleic Acids Res. 11(8) 6513-29). This is beneficial as immobilization using only a single covalent bond is preferred. The phosphoramidate bond joins the DNA to the CovaLink NH secondary amino groups that are positioned at the end of spacer arms covalently grafted onto the polystyrene surface through a 2 nm long spacer arm. To link an oligonucleotide to CovaLink NH via an phosphoramidate bond, the oligonucleotide terminus must have a 5′-end phosphate group. It is, perhaps, even possible for biotin to be covalently bound to CovaLink and then streptavidin used to bind the probes.

[0357] More specifically, the linkage method includes dissolving DNA in water (7.5 ng/ul) and denaturing for 10 min. at 95° C. and cooling on ice for 10 min. Ice-cold 0.1 M 1-methylimidazole, pH 7.0 (1-MeIm₇), is then added to a final concentration of 10 mM 1-MeIm₇. A ss DNA solution is then dispensed into CovaLink NH strips (75 ul/well) standing on ice.

[0358] Carbodiimide 0.2 M 1-ethyl-3-(3-dimethylaminopropyl)-carbodiimide (EDC), dissolved in 10 mM 1-MeIm₇, is made fresh and 25 ul added per well. The strips are incubated for 5 hours at 50° C. After incubation the strips are washed using, e.g., Nunc-Imuno Wash; first the wells are washed 3 times, then they are soaked with washing solution for 5 min., and finally they are washed 3 times (where in the washing solution is 0.4 N NaOH, 0.25% SDS heated to 50° C.).

[0359] It is contemplated that a further suitable method for use with the present invention is that described in PCT Patent Application WO 90/03382 (Southern & Maskos), incorporated herein by reference. This method of preparing an oligonucleotide bound to a support involves attaching a nucleoside 3′-reagent through the phosphate group by a covalent phosphodiester link to aliphatic hydroxyl groups carried by the support. The oligonucleotide is then synthesized on the supported nucleoside and protecting groups removed from the synthetic oligonucleotide chain under standard conditions that do not cleave the oligonucleotide from the support. Suitable reagents include nucleoside phosphoramidite and nucleoside hydrogen phosphorate.

[0360] An on-chip strategy for the preparation of DNA probe for the preparation of DNA probe arrays may be employed. For example, addressable laser-activated photodeprotection may be employed in the chemical synthesis of oligonucleotides directly on a glass surface, as described by Fodor et al. (1991) Science 251(4995) 767-73, incorporated herein by reference. Probes may also be immobilized on nylon supports as described by Van Ness et al. (1991) Nucleic Acids Res. 19(12) 3345-50; or linked to Teflon using the method of Duncan & Cavalier (1988) Anal. Biochem. 169(1) 104-8; all references being specifically incorporated herein.

[0361] To link an oligonucleotide to a nylon support, as described by Van Ness et al. (1991), requires activation of the nylon surface via alkylation and selective activation of the 5′-amine of oligonucleotides with cyanuric chloride.

[0362] One particular way to prepare support bound oligonucleotides is to utilize the light-generated synthesis described by Pease et al, (1994) PNAS USA 91(11) 5022-6, incorporated herein by reference). These authors used current photolithographic techniques to generate arrays of immobilized oligonucleotide probes (DNA chips). These methods, in which light is used to direct the synthesis of oligonucleotide probes in high-density, miniaturized arrays, utilize photolabile 5′-protected N-acyl-deoxynucleoside phosphoramidites, surface linker chemistry and versatile combinatorial synthesis strategies. A matrix of 256 spatially defined oligonucleotide probes may be generated in this manner.

[0363] 4.18 Preparation of Nucleic Acid Fragments

[0364] The nucleic acids may be obtained from any appropriate source, such as cDNAs, genomic DNA, chromosomal DNA, microdissected chromosome bands, cosmid or YAC inserts, and RNA, including mRNA without any amplification steps. For example, Sambrook et al. (1989) describes three protocols for the isolation of high molecular weight DNA from mammalian cells (p. 9.14-9.23).

[0365] DNA fragments may be prepared as clones in M13, plasmid or lambda vectors and/or prepared directly from genomic DNA or cDNA by PCR or other amplification methods. Samples may be prepared or dispensed in multiwell plates. About 100-1000 ng of DNA samples may be prepared in 2-500 ml of final volume.

[0366] The nucleic acids would then be fragmented by any of the methods known to those of skill in the art including, for example, using restriction enzymes as described at 9.24-9.28 of Sambrook et al. (1989), shearing by ultrasound and NaOH treatment.

[0367] Low pressure shearing is also appropriate, as described by Schriefer et al. (1990) Nucleic Acids Res. 18(24) 7455-6, incorporated herein by reference). In this method, DNA samples are passed through a small French pressure cell at a variety of low to intermediate pressures. A lever device allows controlled application of low to intermediate pressures to the cell. The results of these studies indicate that low-pressure shearing is a useful alternative to sonic and enzymatic DNA fragmentation methods.

[0368] One particularly suitable way for fragmenting DNA is contemplated to be that using the two base recognition endonuclease, CviJI, described by Fitzgerald et al. (1992) Nucleic Acids Res. 20(14) 3753-62. These authors described an approach for the rapid fragmentation and fractionation of DNA into particular sizes that they contemplated to be suitable for shotgun cloning and sequencing.

[0369] The restriction endonuclease CviJI normally cleaves the recognition sequence PuGCPy between the G and C to leave blunt ends. Atypical reaction conditions, which alter the specificity of this enzyme (CviJI**), yield a quasi-random distribution of DNA fragments form the small molecule pUC19 (2688 base pairs). Fitzgerald et al. (1992) quantitatively evaluated the randomness of this fragmentation strategy, using a CviJI** digest of pUC19 that was size fractionated by a rapid gel filtration method and directly ligated, without end repair, to a lac Z minus M13 cloning vector. Sequence analysis of 76 clones showed that CviJI** restricts pyGCPy and PuGCPu, in addition to PuGCPy sites, and that new sequence data is accumulated at a rate consistent with random fragmentation.

[0370] As reported in the literature, advantages of this approach compared to sonication and agarose gel fractionation include: smaller amounts of DNA are required (0.2-0.5 ug instead of 2-5 ug); and fewer steps are involved (no preligation, end repair, chemical extraction, or agarose gel electrophoresis and elution are needed

[0371] Irrespective of the manner in which the nucleic acid fragments are obtained or prepared, it is important to denature the DNA to give single stranded pieces available for hybridization. This is achieved by incubating the DNA solution for 2-5 minutes at 80-90° C. The solution is then cooled quickly to 2° C. to prevent renaturation of the DNA fragments before they are contacted with the chip. Phosphate groups must also be removed from genomic DNA by methods known in the art.

[0372] 4.19 Preparation of DNA Arrays

[0373] Arrays may be prepared by spotting DNA samples on a support such as a nylon membrane. Spotting may be performed by using arrays of metal pins (the positions of which correspond to an array of wells in a microtiter plate) to repeated by transfer of about 20 nl of a DNA solution to a nylon membrane. By offset printing, a density of dots higher than the density of the wells is achieved. One to 25 dots may be accommodated in 1 mm², depending on the type of label used. By avoiding spotting in some preselected number of rows and columns, separate subsets (subarrays) maybe formed. Samples in one subarray may be the same genomic segment of DNA (or the same gene) from different individuals, or may be different, overlapped genomic clones. Each of the subarrays may represent replica spotting of the same samples. In one example, a selected gene segment may be amplified from 64 patients. For each patient, the amplified gene segment may be in one 96-well plate (all 96 wells containing the same sample). A plate for each of the 64 patients is prepared. By using a 96-pin device, all samples may be spotted on one 8×12 cm membrane. Subarrays may contain 64 samples, one from each patient. Where the 96 subarrays are identical, the dot span may be 1 mm² and there may be a 1 mm space between subarrays.

[0374] Another approach is to use membranes or plates (available from NUNC, Naperville, Ill.) which may be partitioned by physical spacers e.g. a plastic grid molded over the membrane, the grid being similar to the sort of membrane applied to the bottom of multiwell plates, or hydrophobic strips. A fixed physical spacer is not preferred for imaging by exposure to flat phosphor-storage screens or x-ray films.

[0375] The present invention is illustrated in the following examples. Upon consideration of the present disclosure, one of skill in the art will appreciate that many other embodiments and variations may be made in the scope of the present invention. Accordingly, it is intended that the broader aspects of the present invention not be limited to the disclosure of the following examples. The present invention is not to be limited in scope by the exemplified embodiments which are intended as illustrations of single aspects of the invention, and compositions and methods which are functionally equivalent are within the scope of the invention. Indeed, numerous modifications and variations in the practice of the invention are expected to occur to those skilled in the art upon consideration of the present preferred embodiments. Consequently, the only limitations which should be placed upon the scope of the invention are those which appear in the appended claims.

[0376] All references cited within the body of the instant specification are hereby incorporated by reference in their entirety.

### 5.0 EXAMPLES

### 5.1 Example 1

[0377] Novel Nucleic Acid Sequences Obtained from Various Libraries

[0378] A plurality of novel nucleic acids were obtained from cDNA libraries prepared from various human tissues and in some cases isolated from a genomic library derived from human chromosome using standard PCR, SBH sequence signature analysis and Sanger sequencing techniques. The inserts of the library were amplified with PCR using primers specific for the vector sequences which flank the inserts. Clones from cDNA libraries were spotted on nylon membrane filters and screened with oligonucleotide probes (e.g., 7-mers) to obtain signature sequences. The clones were clustered into groups of similar or identical sequences. Representative clones were selected for sequencing.

[0379] In some cases, the 5′ sequence of the amplified inserts was then deduced using a typical Sanger sequencing protocol. PCR products were purified and subjected to fluorescent dye terminator cycle sequencing. Single pass gel sequencing was done using a 377 Applied Biosystems (ABI) sequencer to obtain the novel nucleic acid sequences. In some cases RACE (Random Amplification of cDNA Ends) was performed to fiber extend the sequence in the 5′ direction.

### 5.2 Example 2

[0380] Novel Nucleic Acids

[0381] The novel nucleic acids of the present invention of the invention were assembled from sequences that were obtained from a cDNA library by methods described in Example 1 above, and in some cases sequences obtained from one or more public databases. The nucleic acids were assembled using an EST sequence as a seed. Then a recursive algorithm was used to extend the seed EST into an extended assemblage, by pulling additional sequences from different databases (i.e., Hyseq's database containing EST sequences, dbEST version 114, gb pri 114, and UniGene version 101) that belong to this assemblage. The algorithm terminated when there was no additional sequences from the above databases that would extend the assemblage. Inclusion of component sequences into the assemblage was based on a BLASTN hit to the extending assemblage with BLAST score greater than 300 and percent identity greater than 95%.

[0382] Using PHRAP (Univ. of Washington) or CAP4 (Paracel), a full length gene cDNA sequence and its corresponding protein sequence were generated from the assemblage. Any frame shifts and incorrect stop codons were corrected by hand editing. During editing, the sequence was checked using FASTY and/or BLAST against Genbank (i.e., dbEST version 118, gb pri 118, UniGene version 118, Genepet release 118). Other computer programs which may have been used in the editing process were phredPhrap and Consed (University of Washington) and ed-ready, ed-ext and gc-zip-2 (Hyseq, Inc.). The full-length nucleotide and amino acid sequences, including splice variants resulting from these procedures are shown in the Sequence Listing as SEQ ID NOS: 1-178.

[0383] Table 1 shows the various tissue sources of SEQ ID NO: 1-178.

[0384] The homology for SEQ ID NO: 1-178 were obtained by a BLASTP version 2.0al 19 MP-WashU search against Genpept release 118, using BLAST algorithm. The results showed homologues for SEQ ID NO: 1-178 from Genpept. The homologues with identifiable functions for SEQ ID NO: 1-178 are shown in Table 2 below.

[0385] Using eMatrix software package (Stanford University, Stanford, Calif.) (Wu et al., J. Comp. Biol., Vol. 6 pp. 219-235 (1999) herein incorporated by reference), all the sequences were examined to determine whether they had identifiable signature regions. Table 3 shows the signature region found in the indicated polypeptide sequences, the description of the signature, the eMatrix p-value(s) and the position(s) of the signature within the polypeptide sequence.

[0386] Using the pFam software program (Sonnhammer et al., Nucleic Acids Res., Vol. 26(1) pp. 320-322 (1998) herein incorporated by reference) all the polypeptide sequences were examined for domains with homology to certain peptide domains. Table 4 shows the name of the domain found, the description, the p-value and the pFam score for the identified domain within the sequence.

[0387] The nucleotide sequence within the sequences that codes for signal peptide sequences and their cleavage sites can be determine from using Neural Network SignalP V1.1 program (from Center for Biological Sequence Analysis, The Technical University of Denmark). The process for identifying prokaryotic and eukaryotic signal peptides and their cleavage sites are also disclosed by Henrik Nielson, Jacob Engelbrecht, Soren Brunak, and Gunnar von Heijne in the publication “Identification of prokaryotic and eukaryotic signal peptides and prediction of their cleavage sites” Protein Engineering, Vol. 10, no. 1, pp. 1-6 (1997), incorporated herein by reference. A maximum S score and a mean S score, as described in the Nielson et as reference, was obtained for the polypeptide sequences. Table 5 shows the position of the signal peptide in each of the polypeptides and the maximum score and mean score associated with that signal peptide.

TABLE 1

| | | HYSEQ | |
|---|---|---|---|
| | | LIBRARY | |
| TISSUE ORIGIN | RNA SOURCE | NAME | SEQ ID NOS: |
| adult brain | GIBCO | AB3001 | 4-5 9 21 23 27 33 42 45-46 |
| | | | 54-55 57 62 69 86 91 95 112- |
| | | | 114 116 134 155 157-158 160 |
| | | | 167-170 |
| adult brain | GIBCO | ABD003 | 2-6 9 14 16 19 21 24 26-29 |
| | | | 33-34 39-40 42-43 46 54 56 |
| | | | 61-62 64 66 70 75 78 80-82 |
| | | | 91 95 98 106-110 113 117-119 |
| | | | 121 129 158 160-162 166-171 |
| | | | 174 176 |
| adult brain | Clontech | ABR001 | 14 21 24 39 55 58 65 70 78 |
| | | | 88 91 94 132 159 |
| adult brain | Clontech | ABR006 | 4 16 33 40 54 78 81 96-97 |
| | | | 111 122 164 176 |
| adult brain | Clontech | ABR008 | 1-2 4-6 8 12 15-17 19 21-24 |
| | | | 26 29-30 33-35 41-42 44 47 |
| | | | 54-55 57-58 61 74-76 78-79 |
| | | | 82-83 86-87 92 94-97 101 |
| | | | 103-104 112-113 115-116 120- |
| | | | 121 123 126-130 134-145 150 |
| | | | 152 156 158 166-170 173 175 |
| adult brain | Clontech | ABR011 | 145 |
| adult brain | BioChain | ABR012 | 3 9 16 27 |
| adult brain | Invitrogen | ABR013 | 91 |
| adult brain | Invitrogen | ABR014 | 37 69-70 167-170 |
| adult brain | Invitrogen | ABR015 | 4 62 64 |
| adult brain | Invitrogen | ABR016 | 46 49 54 65 |
| adult brain | Invitrogen | ABT004 | 2 11 21-22 39 62 72-73 88 |
| | | | 112 121 129-130 134 139-141 |
| | | | 153 162 167-170 178 |
| cultured | Strategene | ADP001 | 2 6 16 18 20-22 27 37 39 52- |
| preadipocytes | | | 53 65-66 77 82 89-91 134 166 |
| | | | 171 |
| adrenal gland | Clontech | ADR002 | 15 17 19-20 23 55 57 68 81 |
| | | | 86 90 95 123-127 129 132 |
| | | | 137-141 151 157 |
| adult heart | GIBCO | AHR001 | 1-3 5 8-9 11-14 16-17 19-20 |
| | | | 23-24 27-28 31-33 41-44 46 |
| | | | 49 52-53 55 57 61-62 64-65 |
| | | | 70 72-73 80-83 85 87-89 91 |
| | | | 95 98-99 101-103 105-109 114 |
| | | | 120-123 132-134 145 150 159 |
| | | | 161 166-170 |
| adult kidney | GIBCO | AKD001 | 1-6 8-9 11 13 15-17 20-23 |
| | | | 25-30 33 37-38 40 42-43 46 |
| | | | 48 51-53 55 58 61-64 69-70 |
| | | | 72-74 77-78 80-84 87 89-92 |
| | | | 95 98 100-102 105-111 113- |
| | | | 114 118-119 121 123 126-127 |
| | | | 129 134-135 137-138 140 142 |
| | | | 145-148 152 160-161 166-171 |
| | | | 175-176 178 |
| adult kidney | Invitrogen | AKT002 | 2-3 5 11 19 21 26 43 46-47 |
| | | | 52-53 55 62 86 91 98 101 110 |
| | | | 125 129 132 137-138 162 |
| adult lung | GIBCO | ALG001 | 1 5-6 9 15-16 19-20 27 42 46 |
| | | | 52-53 56 66 72-73 77 80 82 |
| | | | 86 91 95 101 104-110 113 121 |
| | | | 125-127 148 150 152 |
| lymph node | Clontech | ALN001 | 2-3 5 9 15-17 20 24-25 28 33 |
| | | | 46 64 70 72-74 82 86 89-91 |
| | | | 110 121 156 |
| young liver | GIBCO | ALV001 | 6 9 14 16 20-21 23 27 42-43 |
| | | | 61 69 77 89 91 106-109 121 134 |
| adult liver | Invitrogen | ALV002 | 4 6 11 16 19 46 64-65 70 77 |
| | | | 91 114 123-125 130 134 137- |
| | | | 138 150 167-170 |
| adult ovary | Invitrogen | AOV001 | 2-6 10-16 19-23 25-29 33 39 |
| | | | 42-47 49-50 55-64 66 68-70 |
| | | | 72-74 77-78 80-86 88-92 94- |
| | | | 95 101 103 110 113 116-120 |
| | | | 122-130 134-138 140 142-144 |
| | | | 147 152-153 155-156 160 163 |
| | | | 165-171 173-174 176-178 |
| adult placenta | Invitrogen | APL001 | 7 19 61 64 78 91 110 126-127 |
| | | | 131 145 163 176 |
| placenta | Invitrogen | APL002 | 2 28 42 61 91 113 123-124 |
| | | | 147 |
| adult spleen | GIBCO | ASP001 | 9 13 16-17 19-20 23 27-28 30 |
| | | | 34 41-42 44-47 62 64 70 77 |
| | | | 82 88 91 101-102 106-109 120 |
| | | | 123 125 130 134 137-138 140 |
| | | | 146 148 171 |
| testis | GIBCO | ATS001 | 4-5 9 14 19-20 23 25 27 38 |
| | | | 42-44 46 56 70 77 82 87 91- |
| | | | 93 95 116 124 158 161 |
| adult bladder | Invitrogen | BLD001 | 35 51 62 80 117 126-127 134- |
| | | | 136 173 |
| bone marrow | Clontech | BMD001 | 2-3 5 8-10 12-13 15-18 20 25 |
| | | | 27-28 34 41 43 46 55-56 61 |
| | | | 64 66 69-70 72-73 78-79 82 |
| | | | 84-87 91 93 95 102 106-110 |
| | | | 112-113 120 124 126-127 129 |
| | | | 140 142 145 161 167-172 176 |
| bone marrow | Clontech | BMD002 | 2 4 16 18 26 31-33 46 58 69 |
| | | | 81 91 106-109 115 119 121 |
| | | | 124 126-127 130 166-171 |
| bone marrow | Clontech | BMD004 | 20 |
| bone marrow | Clontech | BMD007 | 16 77 91 |
| adult colon | Invitrogen | CLN001 | 17 19 21 49 64 88 124 131 |
| Mixture of 16 | Various Vendors | CTL021 | 16 28 41 |
| tissues - mRNAs* | | | |
| Mixture of 16 | Various Vendors | CTL028 | 61 159 |
| tissues - mRNAs | | | |
| adult cervix | BioChain | CVX001 | 2-3 5-6 8 15-17 21-22 26-29 |
| | | | 33-34 39 42 44 46 57 59-61 |
| | | | 63-64 66 70-74 78 81 86-87 |
| | | | 91 95 103-104 118 125-129 |
| | | | 134 142-143 152 157 167-170 |
| | | | 174 176 |
| diaphragm | BioChain | DIA002 | 5 |
| endothelial cells | Strategene | EDT001 | 2-6 8 11 13 15-28 30 33 35 |
| | | | 37 39 42-43 46 48-49 55-65 |
| | | | 68 70 72-73 77-78 80 82 85 |
| | | | 87 89 91 95 98 101 103 105- |
| | | | 109 111 117 119 121 123-127 |
| | | | 134-136 140 142 145 148 150 |
| | | | 166 171 174 176 |
| esophagus | BioChain | ESO002 | 16 |
| fetal brain | Clontech | FBR001 | 61 70 77 117 126-127 161 |
| fetal brain | Clontech | FBR004 | 92 164 |
| fetal brain | Clontech | FBR006 | 5 13-16 20-21 23 26 34-35 |
| | | | 42-43 46 54 57-58 77-78 82 |
| | | | 86 91-92 96-97 113 117 123 |
| | | | 126-128 134 139-141 143-144 |
| | | | 150 154 161 166 173 |
| fetal brain | Clontech | FBRs03 | 29 157 |
| fetal brain | Invitrogen | FBT002 | 11 17 19 21 23-24 35 39 41 |
| | | | 48 55 62 75 77 82 91-92 100 |
| | | | 113 121 123 126-127 134 137- |
| | | | 138 142 147 149 151 162 167- |
| | | | 170 |
| fetal heart | Invitrogen | FHR001 | 3 17 |
| fetal kidney | Clontech | FKD001 | 3 5 9 13 16 20 28 43 58 61 |
| | | | 82 91 140 163 |
| fetal kidney | Clontech | FKD002 | 16 114 |
| fetal kidney | Invitrogen | FKD007 | 2 16 27-28 46 80 91 |
| fetal lung | Clontech | FLG001 | 43 61 152 |
| fetal lung | Invitrogen | FLG003 | 19 30 41 52-53 65 70 91 121 |
| | | | 123-124 134 139-141 162 167- |
| | | | 170 |
| fetal liver-spleen | Columbia | FLS001 | 1-5 7-9 11 13-14 16-20 22-28 |
| | University | | 33 41-43 46-47 57-58 61 64 |
| | | | 66 69-70 72-73 77 83-84 87 |
| | | | 91 95 98-99 106-111 113-115 |
| | | | 118 122-125 134-136 142-145 |
| | | | 150 152 161-163 166-171 176- |
| | | | 177 |
| fetal liver-spleen | Columbia | FLS002 | 1-2 5-6 14 16 18-19 22-26 34 |
| | University | | 41 43 58-61 65-66 68 70 72- |
| | | | 73 76 81-82 86 88-89 92 98 |
| | | | 106-111 115-117 123 125-129 |
| | | | 132-136 139-142 144 148 150 |
| | | | 152 162-163 167-170 173 176- |
| | | | 178 |
| fetal liver-spleen | Columbia | FLS003 | 1 16 41 |
| | University | | |
| fetal liver | Invitrogen | FLV001 | 2 4-6 11 17 19 21 30 36 41 |
| | | | 46 64 91 105 121 129 135-136 |
| | | | 171 |
| fetal liver | Clontech | FLV004 | 4 16 42 115 126-127 |
| fetal muscle | Invitrogen | FMS001 | 4 22 25 28 84 91 95 115 121- |
| | | | 122 166 172-173 |
| fetal muscle | Invitrogen | FMS002 | 92 145 |
| fetal skin | Invitrogen | FSK001 | 1-2 4-5 11 14 16 19 21-23 |
| | | | 27-28 30 34-35 39 52-53 56 |
| | | | 58 62 64 80-81 83 86 89 91- |
| | | | 92 101 103 105 113 121 123 |
| | | | 126-127 130 132 134 147 152 |
| | | | 159 161 166 173-174 |
| fetal skin | Invitrogen | FSK002 | 4 16-17 106-109 115 124 156 |
| | | | 159 |
| fetal spleen | BioChain | FSP001 | 16 |
| umbilical cord | BioChain | FUC001 | 3-7 10 13-14 16 18 20 25-26 |
| | | | 28 35 41 44 46 57 61 65-66 |
| | | | 69 77 80-81 91-92 98 101 105 |
| | | | 110 112 120 124 126-128 130 |
| | | | 134-135 143 161 176 |
| fetal brain | GIBCO | HFB001 | 2-6 10 16 24-26 43 46 57-61 |
| | | | 64-65 67-68 70 72-73 75 82 |
| | | | 85-87 91 95 100-101 113 115- |
| | | | 116 120 126-129 132 134 139- |
| | | | 142 145 147 149 154-155 164- |
| | | | 165 167-170 |
| macrophage | Invitrogen | HMP001 | 16 70 |
| infant brain | Columbia | IB2002 | 3-6 17 19 24 29-30 37 43 46 |
| | University | | 48-49 52-54 57 64 66 68 70- |
| | | | 77 81 91 98 100-101 103 112 |
| | | | 115 117 119 121 123 125 130 |
| | | | 132-133 137-141 147 149 154 |
| | | | 158 162 165-170 |
| infant brain | Columbia | IB2003 | 4-5 18-19 26 28 52-54 57 68 |
| | University | | 71 74 77 86 101 121 129-130 |
| | | | 134 137-140 147 158 162 166 |
| | | | 171 |
| infant brain | Columbia | IBM002 | 91 115 132 171 |
| | University | | |
| infant brain | Columbia | IBS001 | 4 23 44 64 147 |
| | University | | |
| lung, fibroblast | Strategene | LFB001 | 2-3 5 14 16 25 27-28 42 44 |
| | | | 46 56 61 82 91-92 105-109 |
| | | | 111 125-127 134 |
| lung tumor | Invitrogen | LGT002 | 1 4-5 8 11 16 18-22 24-29 35 |
| | | | 42-43 46-47 55-57 62 64 66 |
| | | | 68 70 77 80-81 83-84 86 90- |
| | | | 92 94-95 101-102 106-112 118 |
| | | | 121 123 125-127 129-130 134- |
| | | | 135 137-138 140 142 144 146 |
| | | | 152 164 167-170 177 |
| lymphocytes | ATCC | LPC001 | 4-5 13 19-20 25-26 43 59-60 |
| | | | 72-73 91 93 102 110 118 120 |
| | | | 122 124 126-127 129 142 146 |
| | | | 150 153 165 167-170 174 |
| leukocyte | GIBCO | LUC001 | 1-6 8-9 13 15-17 19-21 23-30 |
| | | | 33 41-46 50 55-58 61-62 64 |
| | | | 66 68-70 72-74 77-82 84-91 |
| | | | 95 102-103 106-112 115 118- |
| | | | 119 121 123 125-131 134 137- |
| | | | 142 145-146 155-156 163 166- |
| | | | 171 176-177 |
| leukocyte | Clontech | LUC003 | 3 8 15-16 28 58 61 63 70 95 |
| | | | 110 113 130 139-141 |
| Melanoma from cell | Clontech | MEL004 | 3 5 11 13 15-16 20 43 46 56 |
| line ATCC # CRL 1424 | | | 61 72-73 81 91 98 115 134 |
| | | | 150 176 |
| mammary gland | Invitrogen | MMG001 | 1-2 4-6 9 11 13-15 17-23 26- |
| | | | 28 34-35 39 45 47 51 55 59- |
| | | | 60 62 64-66 69-70 77-78 80 |
| | | | 85-86 90-91 101-102 105-109 |
| | | | 113 121 123 129 134-142 144 |
| | | | 152-153 166-170 174-175 |
| induced neuron cells | Strategene | NTD001 | 3-5 63 82 85 91 113 162 173 |
| retinoid acid | Strategene | NTR001 | 1 3 16 37 46 166 |
| induced neuronal | | | |
| cells | | | |
| neuronal cells | Strategene | NTU001 | 3 5 16-17 27 35 70 91 122 |
| | | | 176 |
| pituitary gland | Clontech | PIT004 | 41 46 57 77 91 126-127 148 |
| prostate | Clontech | PRT001 | 3 5 13 15 17 20-21 28 43 46 |
| | | | 58 69 77 81 145 166-170 176 |
| rectum | Invitrogen | REC001 | 6 22 28 39 44 46 52-53 91 |
| | | | 121 149 164 |
| salivary gland | Clontech | SAL001 | 5 19 26 42 56 82 86 91 110 |
| | | | 135-136 152 176 |
| salivary gland | Clontech | SALs03 | 29 |
| skin fibroblast | ATCC | SFB001 | 91 123 |
| skin fibroblast | ATCC | SFB002 | 11 123 |
| skin fibroblast | ATCC | SFB003 | 11 |
| small intestine | Clontech | SIN001 | 1 20 28 61 92 114 118 132 |
| | | | 147 150 152 175 |
| skeletal muscle | Clontech | SKM001 | 5 27 58 121 126-127 137-138 |
| skeletal muscle | Clontech | SKM002 | 20 123 |
| spinal cord | Clontech | SPC001 | 1 3 16-17 19-20 23 27 39 41 |
| | | | 58 70 78 81-82 91 98-99 105 |
| | | | 119 130 153 167-170 |
| adult spleen | Clontech | SPLc01 | 16 25 34 42 87 91 113 116 |
| | | | 124 |
| stomach | Clontech | STO001 | 16 20 58 61 93 142 177 |
| thalamus | Clontech | THA002 | 11 15 21 39 47 70-71 91 100 |
| | | | 123 129 133 139-141 157 |
| thymus | Clontech | THM001 | 6 8 10 17 19 26 38 43 55-56 |
| | | | 58 69-70 72-73 77 82 86 91 |
| | | | 102 110 118 121-122 126-127 |
| | | | 143 |
| thymus | Clontech | THMc02 | 14 18-21 25-26 40 43 57-61 |
| | | | 72-73 81 85-89 91 102 106- |
| | | | 109 121 123-124 126-128 134 |
| | | | 139-140 151 156 159 161 176 |
| thyroid gland | Clontech | THR001 | 3 5 10-13 15-16 19 21 23-25 |
| | | | 33-34 39 42-44 46 49 57 61 |
| | | | 64 69-70 76 81 83 85-86 89 |
| | | | 91 95 101 103 105 110 113 |
| | | | 116 121 123 126-127 129 134 |
| | | | 142 147 150 152-153 155 159 |
| | | | 173 176 |
| trachea | Clontech | TRC001 | 2 6 25 44 65 83 95 105 111 |
| | | | 143 167-170 174 |
| uterus | Clontech | UTR001 | 13 42-44 46 77 91 95 135 157 |
| | | | 173 177 |
| *The 16 tissue-mRNAs and their vendor source, are as follows: 1) Normal adult brain mRNA (Invitrogen), 2) normal adult kidney mRNA (Invitrogen), 3) normal adult liver mRNA (Invitrogen), 4) normal fetal brain mRNA (Invitrogen), 5) normal fetal kidney mRNA (Invitrogen), 6) normal fetal liver mRNA (Invitrogen), 7) normal fetal skin mRNA (Invitrogen), 8) human adrenal gland mRNA (Clontech), 9) human bone marrow mRNA (Clontech), 10) human leukemia lymphablastic mRNA (Clontech), | | | |
| # 11) human thymus mRNA (Clontech), 12) human lymph node mRNA (Clontech), 13) human spinal cord mRNA (Clontech), 14) human thyroid mRNA (Clontech), 15) human esophagus mRNA (BioChain), 16) human conceptional umbilical cord mRNA (BioChain). | | | |

[0388] TABLE 2

| | CORRESPONDING | | | | |
|---|---|---|---|---|---|
| | SEQ ID NO. IN | | | SMITH- | |
| SEQ ID | U.S.S.N | ACCESSION | | WATERMAN | |
| NO: | 09/577, 408 | NUMBER | DESCRIPTION | SCORE | % IDENTITY |
| 1 | 1041 | AF186469 | Rattus norvegicus | 1353 | 92 |
| | 1042 | | TM6P1 | | |
| | 1043 | | | | |
| 2 | 1216 | AF151872 | Homo sapiens CGI- | 1074 | 100 |
| | 1217 | | 114 protein | | |
| | 1218 | | | | |
| | 1219 | | | | |
| | 1220 | | | | |
| | 1221 | | | | |
| 3 | 1246 | Y00711 | Homo sapiens | 1702 | 100 |
| | 1247 | | lactate | | |
| | | | dehydrogenase B (AA | | |
| | | | 1-334) | | |
| 4 | 1287 | AL035661 | Homo sapiens | 2128 | 97 |
| | 1288 | | dJ568C11.2 (novel | | |
| | 1289 | | protein similar to | | |
| | | | worm, plant and fly | | |
| | | | proteins) | | |
| 5 | 1561 | L08666 | Homo sapiens porin | 1610 | 100 |
| 6 | 1572 | L10244 | Mus musculus | 193 | 59 |
| | 1573 | | spermidine/spermine | | |
| | 1574 | | N1- | | |
| | | | acetyltransferase | | |
| 7 | 1611 | AJ005894 | Homo sapiens JM27 | 541 | 100 |
| 8 | 1653 | Z75331 | Homo sapiens | 5961 | 99 |
| | 1654 | | nuclear protein SA-2 | | |
| 9 | 1712 | X57352 | Homo sapiens 1-8U | 692 | 98 |
| | 1713 | | | | |
| 10 | 1715 | X17576 | Homo sapiens nck | 2007 | 100 |
| | | | protein (AA 1-377) | | |
| 11 | 1791 | X71129 | Homo sapiens | 1265 | 99 |
| | 1792 | | electron transfer | | |
| | 1793 | | flavoprotein beta | | |
| | 1794 | | subunit | | |
| | 1795 | | | | |
| 12 | 1843 | AL049483 | Arabidopsis | 295 | 30 |
| | | | thaliana putative | | |
| | | | leucine-rich-repeat | | |
| | | | protein | | |
| 13 | 1849 | AB000910 | Sus scrofa | 572 | 100 |
| | | | ribosomal protein | | |
| 14 | 1857 | U93567 | Homo sapiens p40 | 877 | 94 |
| | 1858 | | | | |
| | 1859 | | | | |
| | 1860 | | | | |
| 15 | 1864 | AL132949 | Caenorhabditis | 418 | 20 |
| | 1865 | | elegans Y53F4B.21 | | |
| | 1866 | | | | |
| | 1867 | | | | |
| | 1868 | | | | |
| | 1869 | | | | |
| 16 | 1896 | M11147 | Homo sapiens | 641 | 99 |
| | | | ferritin light | | |
| | | | chain | | |
| 17 | 1930 | AJ249366 | Homo sapiens | 1575 | 100 |
| | 1931 | | epsilon-COP protein | | |
| | 1932 | | | | |
| 18 | 1934 | X65550 | Homo sapiens | 16757 | 99 |
| | 1935 | | antigen of the | | |
| | | | monoclonal antibody | | |
| | | | Ki-67 | | |
| 19 | 1958 | D90906 | Synechocystis sp. | 393 | 36 |
| | 1959 | | cell division | | |
| | 1960 | | inhibitor | | |
| | 1961 | | | | |
| 20 | 1962 | M64716 | Homo sapiens | 632 | 100 |
| | 1963 | | ribosomal protein | | |
| 21 | 1970 | AB034634 | Rattus norvegicus | 1217 | 86 |
| | 1971 | | tRNA-guanine | | |
| | | | transglycosylase | | |
| 22 | 1998 | S85655 | Homo sapiens | 671 | 87 |
| | 1999 | | prohibitin | | |
| 23 | 2016 | Z82084 | Caenorhabditis | 319 | 30 |
| | 2017 | | elegans ZK1053.6 | | |
| 24 | 2032 | U83176 | Mus musculus | 2151 | 80 |
| | 2033 | | ROSA26AS | | |
| | 2034 | | | | |
| | 2035 | | | | |
| 25 | 2037 | X91911 | Homo sapiens rtvp-1 | 1457 | 99 |
| 26 | 2071 | AF180471 | Mus musculus | 4163 | 88 |
| | 2072 | | Kiaa0188 | | |
| | 2073 | | | | |
| 27 | 2079 | X57351 | Homo sapiens 1-8D | 683 | 99 |
| 28 | 2111 | X64707 | Homo sapiens BBC1 | 1068 | 99 |
| 29 | 2123 | AF172066 | Homo sapiens | 1205 | 99 |
| | | | retinoic acid | | |
| | | | repressible protein | | |
| 30 | 2147 | X91809 | Homo sapiens GAIP | 1172 | 100 |
| 31 | 2178 | X54162 | Homo sapiens 64 Kd | 711 | 39 |
| | 2179 | | autoantigen | | |
| | 2180 | | | | |
| | 2181 | | | | |
| 32 | 2178 | X54162 | Homo sapiens 64 Kd | 713 | 41 |
| | 2179 | | autoantigen | | |
| | 2180 | | | | |
| | 2181 | | | | |
| 33 | 2186 | AL109939 | Homo sapiens | 1872 | 100 |
| | 2187 | | dJ351K20.1.1 (novel | | |
| | 2188 | | C3HC4 type Zinc | | |
| | 2189 | | finger (RING | | |
| | | | finger) protein | | |
| | | | (isoform 1)) | | |
| 34 | 2204 | AL049795 | Homo sapiens | 1169 | 73 |
| | 2205 | | dJ622L5.2 (novel | | |
| | 2206 | | protein) | | |
| | 2207 | | | | |
| 35 | 2209 | AF053368 | Mus musculus lysyl | 2685 | 93 |
| | 2210 | | oxidase-related | | |
| | 2211 | | protein 2 | | |
| | 2212 | | | | |
| | 2213 | | | | |
| | 2214 | | | | |
| | 2215 | | | | |
| | 2216 | | | | |
| | 2217 | | | | |
| 36 | 2220 | AL031009 | Homo sapiens | 607 | 100 |
| | | | c431H6.1.1 | | |
| | | | (PUTATIVE novel | | |
| | | | protein) (isoform | | |
| | | | 1) | | |
| 37 | 2244 | D43758 | Macaca mulatta | 73 | 37 |
| | 2245 | | fibrinogen A-alpha- | | |
| | 2246 | | chain | | |
| | 2247 | | | | |
| | 2248 | | | | |
| 38 | 2252 | U93574 | Homo sapiens | 172 | 68 |
| | 2253 | | putative p150 | | |
| | 2254 | | | | |
| 39 | 2282 | AF272357 | Homo sapiens NPDC1- | 1730 | 99 |
| | 2283 | | like protein | | |
| 40 | 2290 | AL080239 | Homo sapiens | 1713 | 45 |
| | | | bG256O22.1 (similar | | |
| | | | to IGFALS (insulin- | | |
| | | | like growth factor | | |
| | | | binding protein, | | |
| | | | acid labile | | |
| | | | subunit)) | | |
| 41 | 2362 | V00488 | Homo sapiens alpha | 649 | 92 |
| | 2363 | | globin | | |
| | 2364 | | | | |
| 42 | 2385 | U97402 | Caenorhabditis | 869 | 47 |
| | 2386 | | elegans contains | | |
| | | | similarity to | | |
| | | | thioredoxin domains | | |
| 43 | 2388 | X59417 | Homo sapiens | 1276 | 100 |
| | | | prosomal P27K | | |
| | | | protein | | |
| 44 | 2404 | AF056035 | Rattus norvegicus | 2655 | 85 |
| | 2405 | | s-nexilin | | |
| 45 | 2481 | L20321 | Homo sapiens | 177 | 62 |
| | | | protein | | |
| | | | serine/threonine | | |
| | | | kinase | | |
| 46 | 2511 | D14531 | Homo sapiens ‘human | 899 | 100 |
| | | | homologue of rat | | |
| | | | ribosomal protein | | |
| | | | L9’ | | |
| 47 | 2521 | X91046 | Eremothecium | 382 | 37 |
| | | | gossypii | | |
| | | | complements S. | | |
| | | | cerevisiae thr4- | | |
| | | | mutation | | |
| 48 | 2572 | Z14134 | Dictyostelium | 226 | 30 |
| | | | discoideum ras- | | |
| | | | related protein | | |
| 49 | 2598 | D78255 | Mus musculus PAP-1 | 621 | 90 |
| | 2599 | | | | |
| | 2600 | | | | |
| | 2601 | | | | |
| 50 | 2624 | A79997 | Homo sapiens PART | 52 | 37 |
| | | | OF HIGH MOBILITY | | |
| | | | GROUP PROTEIN | | |
| 51 | 2634 | D86864 | Homo sapiens acetyl | 1204 | 50 |
| | 2635 | | LDL receptor | | |
| 52 | 2642 | AC006733 | Caenorhabditis | 371 | 33 |
| | 2643 | | elegans contains | | |
| | | | similarity to Pfam | | |
| | | | family PF00400 (WD | | |
| | | | domain, G-beta | | |
| | | | repeat), | | |
| | | | score = 31.6, E = 1.8e−05, | | |
| | | | N = 2 | | |
| 53 | 2642 | AC006733 | Caenorhabditis | 566 | 33 |
| | 2643 | | elegans contains | | |
| | | | similarity to Pfam | | |
| | | | family PF00400 (WD | | |
| | | | domain, G-beta | | |
| | | | repeat), | | |
| | | | score = 31.6, E = 1.8e−05, | | |
| | | | N = 2 | | |
| 54 | 2644 | AF036943 | Homo sapiens myelin | 6276 | 99 |
| | 2645 | | transcription | | |
| | 2646 | | factor 1-like | | |
| | 2647 | | | | |
| 55 | 2648 | AL021918 | Homo sapiens | 960 | 39 |
| | 2649 | | b34I8.1 (Kruppel | | |
| | 2650 | | related Zinc Finger | | |
| | | | protein 184) | | |
| 56 | 2653 | AJ132860 | Bos taurus receptor | 547 | 100 |
| | 2654 | | for activated C | | |
| | | | kinase | | |
| 57 | 2722 | AJ000644 | Homo sapiens SPOP | 1958 | 100 |
| | 2723 | | | | |
| | 2724 | | | | |
| 58 | 2744 | X17459 | Mus musculus J | 1441 | 95 |
| | 2745 | | kappa RS-binding | | |
| | 2746 | | protein | | |
| | 2747 | | | | |
| 59 | 2772 | AL031427 | Homo sapiens | 745 | 100 |
| | 2773 | | dJ167A19.3 (novel | | |
| | 2774 | | protein) | | |
| | 2775 | | | | |
| 60 | 2772 | AL031427 | Homo sapiens | 364 | 100 |
| | 2773 | | dJ167A19.3 (novel | | |
| | 2774 | | protein) | | |
| | 2775 | | | | |
| 61 | 2814 | X15822 | Homo sapiens | 413 | 100 |
| | 2815 | | precursor (AA −23 | | |
| | | | to 60) | | |
| 62 | 2913 | Z35600 | Caenorhabditis | 504 | 82 |
| | 2914 | | elegans F37A8.5 | | |
| 63 | 2974 | AF116692 | Homo sapiens | 671 | 82 |
| | 2975 | | PRO2207 | | |
| | 2976 | | | | |
| | 2977 | | | | |
| 64 | 3043 | A06407 | synthetic construct | 697 | 100 |
| | | | tac-sod hybrid | | |
| 65 | 3073 | AL132959 | Arabidopsis | 590 | 48 |
| | 3074 | | thaliana | | |
| | | | exonuclease RRP41 | | |
| 66 | 3075 | U19251 | Homo sapiens | 478 | 30 |
| | 3076 | | neuronal apoptosis | | |
| | 3077 | | inhibitory protein | | |
| | 3078 | | | | |
| 67 | 3092 | AF068294 | Homo sapiens | 234 | 72 |
| | | | HDCMB45P | | |
| 68 | 3117 | AF161354 | Homo sapiens | 955 | 98 |
| | 3118 | | HSPC091 | | |
| | 3119 | | | | |
| | 3120 | | | | |
| | 3121 | | | | |
| 69 | 3134 | D13891 | Homo sapiens Id-2H | 680 | 100 |
| | 3135 | | | | |
| | 3136 | | | | |
| 70 | 3137 | U89439 | Bos taurus | 275 | 100 |
| | | | ubiquitin-like | | |
| | | | protein | | |
| 71 | 3173 | AF083116 | Homo sapiens | 349 | 34 |
| | | | paraneoplastic | | |
| | | | cancer-testis-brain | | |
| | | | antigen | | |
| 72 | 3175 | U39850 | Caenorhabditis | 253 | 34 |
| | 3176 | | elegans coded for | | |
| | 3177 | | by C. elegans cDNA | | |
| | | | yk127b8.5; coded | | |
| | | | for by C. elegans | | |
| | | | cDNA yk127b8.3 | | |
| 73 | 3175 | U39850 | Caenorhabditis | 217 | 39 |
| | 3176 | | elegans coded for | | |
| | 3177 | | by C. elegans cDNA | | |
| | | | yk127b8.5; coded | | |
| | | | for by C. elegans | | |
| | | | cDNA yk127b8.3 | | |
| 74 | 3178 | U35730 | Mus musculus jerky | 435 | 33 |
| | 3179 | | | | |
| 75 | 3183 | AF243495 | Homo sapiens | 736 | 54 |
| | | | hepatocellular | | |
| | | | carcinoma- | | |
| | | | associated antigen | | |
| | | | 67 | | |
| 76 | 3187 | X99962 | Homo sapiens rab- | 865 | 74 |
| | | | related GTP-binding | | |
| | | | protein | | |
| 77 | 3227 | L54057 | Homo sapiens | 730 | 100 |
| | 3228 | | deduced protein | | |
| | | | product shows | | |
| | | | significant | | |
| | | | homology to | | |
| | | | coactosin from | | |
| | | | Dictyostelium | | |
| | | | discoideum | | |
| 78 | 3355 | Z19092 | Oryctolagus | 285 | 28 |
| | 3356 | | cuniculus | | |
| | | | trichohyalin | | |
| 79 | 3357 | AC003083 | Homo sapiens | 1465 | 100 |
| | | | mitochondrial | | |
| | | | carrier protein- | | |
| | | | like; similar to | | |
| | | | Q09461 | | |
| | | | (PID:g2497990) | | |
| 80 | 3400 | AJ223980 | Homo sapiens BCL7C | 1112 | 99 |
| | 3401 | | | | |
| 81 | 3424 | L07144 | Caenorhabditis | 566 | 28 |
| | | | elegans putative | | |
| 82 | 3425 | U41624 | Caenorhabditis | 72 | 40 |
| | 3426 | | elegans contains | | |
| | 3427 | | EGF-like repeats; | | |
| | 3428 | | similar to C. | | |
| | | | elegans protein | | |
| | | | D1044.3 | | |
| 83 | 3435 | AB035742 | Homo sapiens | 696 | 100 |
| | 3436 | | DSCR5a1 | | |
| | 3437 | | | | |
| 84 | 3464 | U67085 | Homo sapiens TcD37 | 2191 | 99 |
| | 3465 | | homolog | | |
| | 3466 | | | | |
| | 3467 | | | | |
| | 3468 | | | | |
| 85 | 3521 | AB034205 | Homo sapiens | 199 | 40 |
| | | | cisplatin | | |
| | | | resistance- | | |
| | | | associated | | |
| | | | overexpressed | | |
| | | | protein | | |
| 86 | 3528 | AL049795 | Homo sapiens | 441 | 51 |
| | 3529 | | dJ622L5.3 (novel | | |
| | 3530 | | protein) | | |
| 87 | 3554 | X95073 | Homo sapiens | 1488 | 100 |
| | | | Translin associated | | |
| | | | protein X | | |
| 88 | 3561 | AK000052 | Homo sapiens | 1073 | 99 |
| | 3562 | | unnamed protein | | |
| | 3563 | | product | | |
| 89 | 3570 | AF161488 | Homo sapiens | 559 | 100 |
| | | | HSPC139 | | |
| 90 | 3600 | AF129534 | Homo sapiens F-box | 1990 | 96 |
| | 3601 | | protein Fbx4 | | |
| 91 | 3605 | X56932 | Homo sapiens 23 kD | 1044 | 100 |
| | | | highly basic | | |
| | | | protein | | |
| 92 | 3620 | U68253 | Caenorhabditis | 61 | 39 |
| | 3621 | | elegans rab6-like | | |
| | 3622 | | | | |
| 93 | 3629 | AF013108 | Chlamydomonas | 78 | 32 |
| | 3630 | | reinhardtii tubulin | | |
| | | | Uni3 | | |
| 94 | 3634 | AP001660 | Homo sapiens | 886 | 98 |
| | 3635 | | putative gene, RNA | | |
| | 3636 | | binding motif 11 | | |
| | | | like, confirmed by | | |
| | | | RT-PCR | | |
| 95 | 3638 | X64229 | Homo sapiens | 1900 | 100 |
| | | | putative oncogene | | |
| 96 | 3656 | AL161946 | Arabidopsis | 110 | 27 |
| | 3657 | | thaliana putative | | |
| | | | protein | | |
| 97 | 3656 | M63279 | Plasmodium | 80 | 27 |
| | 3657 | | falciparum malaria | | |
| | | | antigen | | |
| 98 | 3658 | AF126743 | Homo sapiens DNAJ | 755 | 100 |
| | | | domain-containing | | |
| | | | protein MCJ | | |
| 99 | 3659 | U62940 | Rattus norvegicus | 336 | 55 |
| | | | mt-GrpE#1 precursor | | |
| 100 | 3667 | X96589 | Rattus norvegicus | 2721 | 75 |
| | 3668 | | dendrin | | |
| 101 | 3675 | AF223467 | Homo sapiens NPD008 | 1019 | 98 |
| | 3676 | | protein | | |
| | 3677 | | | | |
| 102 | 3698 | Z35227 | Homo sapiens small | 989 | 100 |
| | | | G protein | | |
| 103 | 3710 | AF038606 | Caenorhabditis | 431 | 35 |
| | 3711 | | elegans contains | | |
| | 3712 | | similarity to | | |
| | 3713 | | cytoskeletal | | |
| | | | keratin | | |
| 104 | 3727 | D86984 | Homo sapiens | 910 | 50 |
| | | | similar to yeast | | |
| | | | adenylate cyclase | | |
| | | | (S56776) | | |
| 105 | 3742 | Z50194 | Homo sapiens PQ- | 2212 | 100 |
| | | | rich protein | | |
| 106 | 3748 | M36263 | Homo sapiens | 1588 | 99 |
| | 3749 | | placental 17-beta- | | |
| | 3750 | | hydroxysteroid | | |
| | 3751 | | dehydrogenase | | |
| | 3752 | | precursor (EC | | |
| | | | 1.1.1.62) | | |
| 107 | 3748 | M36263 | Homo sapiens | 1588 | 99 |
| | 3749 | | placental 17-beta- | | |
| | 3750 | | hydroxysteroid | | |
| | 3751 | | dehydrogenase | | |
| | 3752 | | precursor (EC | | |
| | | | 1.1.1.62) | | |
| 108 | 3748 | M36263 | Homo sapiens | 1588 | 99 |
| | 3749 | | placental 17-beta- | | |
| | 3750 | | hydroxysteroid | | |
| | 3751 | | dehydrogenase | | |
| | 3752 | | precursor (EC | | |
| | | | 1.1.1.62) | | |
| 109 | 3748 | M36263 | Homo sapiens | 1588 | 99 |
| | 3749 | | placental 17-beta- | | |
| | 3750 | | hydroxysteroid | | |
| | 3751 | | dehydrogenase | | |
| | 3752 | | precursor (EC | | |
| | | | 1.1.1.62) | | |
| 110 | 3761 | D14571 | Mus musculus | 943 | 98 |
| | 3762 | | ‘PEBP2b2 protein’ | | |
| | 3763 | | | | |
| | 3764 | | | | |
| 111 | 3776 | Z99297 | Homo sapiens | 277 | 100 |
| | 3777 | | dJ262D12.2 | | |
| | 3778 | | ((mitochondrial/chloroplast | | |
| | | | 30S | | |
| | | | ribosomal protein | | |
| | | | S14)-LIKE protein) | | |
| 112 | 3785 | Y15054 | Rattus norvegicus | 1509 | 76 |
| | 3786 | | 70 kD tumor- | | |
| | 3787 | | specific antigen | | |
| 113 | 3804 | AF151902 | Homo sapiens CGI- | 454 | 100 |
| | 3805 | | 144 protein | | |
| 114 | 3858 | AF179726 | Papio hamadryas | 772 | 96 |
| | | | olfactory receptor | | |
| 115 | 3861 | X74504 | Mus musculus T10 | 1110 | 86 |
| | 3862 | | | | |
| | 3863 | | | | |
| | 3864 | | | | |
| | 3865 | | | | |
| 116 | 3866 | AB006746 | Homo sapiens | 730 | 47 |
| | 3867 | | hMmTRA1b | | |
| 117 | 3876 | Z35600 | Caenorhabditis | 541 | 87 |
| | 3877 | | elegans F37A8.5 | | |
| 118 | 3883 | AB004539 | Schizosaccharomyces | 240 | 27 |
| | 3884 | | pombe HYPOTHETICAL | | |
| | | | 229.9 KD PROTEIN IN | | |
| | | | NUC1-PRP21 | | |
| | | | INTERGENIC REGION | | |
| 119 | 3885 | AJ011523 | Caenorhabditis | 1395 | 40 |
| | | | elegans CHE-2 | | |
| | | | protein | | |
| 120 | 3894 | AF069302 | Pediococcus | 78 | 39 |
| | 3895 | | pentosaceus penD | | |
| 121 | 3926 | AF176520 | Mus musculus WD | 1939 | 82 |
| | | | repeat-containing | | |
| | | | F-box protein FBW5 | | |
| 122 | 3946 | AF133913 | Mus musculus ARL-6 | 440 | 72 |
| | 3947 | | interacting | | |
| | 3948 | | protein-6 | | |
| | 3949 | | | | |
| 123 | 3983 | Y12059 | Homo sapiens strong | 3799 | 100 |
| | 3984 | | homology to human | | |
| | 3985 | | RING3 sequence | | |
| 124 | 3988 | Z83844 | Homo sapiens | 1591 | 72 |
| | 3989 | | dJ37E16.4 (novel | | |
| | | | protein similar to | | |
| | | | mouse RIP3 (P116 | | |
| | | | Rho-interacting | | |
| | | | protein) and rat | | |
| | | | RB109) | | |
| 125 | 4012 | AF153208 | Homo sapiens GC- | 92 | 66 |
| | 4013 | | rich sequence DNA- | | |
| | | | binding factor | | |
| | | | candidate | | |
| 126 | 4015 | AF013969 | Mus musculus | 2558 | 45 |
| | 4016 | | antigen containing | | |
| | 4017 | | epitope to | | |
| | 4018 | | monoclonal antibody | | |
| | | | MMS-85/12 | | |
| 127 | 4015 | AF013969 | Mus musculus | 2546 | 47 |
| | 4016 | | antigen containing | | |
| | 4017 | | epitope to | | |
| | 4018 | | monoclonal antibody | | |
| | | | MMS-85/12 | | |
| 128 | 4067 | AF247501 | Drosophila | 174 | 34 |
| | 4068 | | melanogaster | | |
| | 4069 | | PINEAPPLE EYE | | |
| 129 | 4082 | U69127 | Homo sapiens FUSE | 2902 | 98 |
| | 4083 | | binding protein 3 | | |
| | 4084 | | | | |
| | 4085 | | | | |
| 130 | 4092 | AL022238 | Homo sapiens | 1217 | 95 |
| | 4093 | | dJ1042K10.3 (novel | | |
| | 4094 | | protein) | | |
| | 4095 | | | | |
| 131 | 4155 | Y10658 | Homo sapiens | 390 | 97 |
| | | | nuclear DNA | | |
| | | | helicase II | | |
| 132 | 4163 | AF178983 | Homo sapiens Ras- | 1328 | 100 |
| | | | associated protein | | |
| | | | Rap1 | | |
| 133 | 4218 | U76298 | Arabidopsis | 75 | 52 |
| | | | thaliana uclacyanin I | | |
| 134 | 4436 | Y12065 | Homo sapiens hNop56 | 2894 | 97 |
| | 4437 | | | | |
| | 4438 | | | | |
| 135 | 4480 | AB030483 | Mus musculus B9 | 99 | 24 |
| | 4481 | | | | |
| | 4482 | | | | |
| | 4483 | | | | |
| 136 | 4480 | AB030506 | Homo sapiens B9 | 107 | 32 |
| | 4481 | | | | |
| | 4482 | | | | |
| | 4483 | | | | |
| 137 | 4505 | AJ245937 | Homo sapiens | 2448 | 99 |
| | 4506 | | glucose transporter | | |
| 138 | 4505 | AJ245937 | Homo sapiens | 1720 | 99 |
| | 4506 | | glucose transporter | | |
| 139 | 4520 | AL078621 | Homo sapiens | 1160 | 95 |
| | 4521 | | bA395L14.11.1 (RAB, | | |
| | 4522 | | member of RAS | | |
| | 4523 | | oncogene family- | | |
| | 4524 | | like 2B (isoform | | |
| | 4525 | | 1)) | | |
| | 4526 | | | | |
| | 4527 | | | | |
| | 4528 | | | | |
| 140 | 4520 | AL078621 | Homo sapiens | 923 | 94 |
| | 4521 | | bA395L14.11.1 (RAB, | | |
| | 4522 | | member of RAS | | |
| | 4523 | | oncogene family- | | |
| | 4524 | | like 2B (isoform | | |
| | 4525 | | 1)) | | |
| | 4526 | | | | |
| | 4527 | | | | |
| | 4528 | | | | |
| 141 | 4520 | AL078621 | Homo sapiens | 518 | 98 |
| | 4521 | | bA395L14.11.1 (RAB, | | |
| | 4522 | | member of RAS | | |
| | 4523 | | oncogene family- | | |
| | 4524 | | like 2B (isoform | | |
| | 4525 | | 1)) | | |
| | 4526 | | | | |
| | 4527 | | | | |
| | 4528 | | | | |
| 142 | 4529 | X79380 | Saccharomyces | 139 | 31 |
| | 4530 | | cerevisiae QRI2 | | |
| | 4531 | | | | |
| | 4532 | | | | |
| | 4533 | | | | |
| | 4534 | | | | |
| | 4535 | | | | |
| 143 | 4536 | U43281 | Saccharomyces | 479 | 38 |
| | 4537 | | cerevisiae Lpg6p | | |
| 144 | 4607 | U32828 | Haemophilus | 295 | 31 |
| | 4608 | | influenzae Rd | | |
| | | | ribosomal protein | | |
| | | | S6 modification | | |
| | | | protein (rimK) | | |
| 145 | 4620 | AF208844 | Homo sapiens BM-002 | 193 | 95 |
| 146 | 4624 | AB023483 | Homo sapiens | 1533 | 100 |
| | | | docking protein | | |
| | | | BRDG1 | | |
| 147 | 4666 | X96401 | Homo sapiens ROX | 2942 | 100 |
| | 4667 | | protein | | |
| 148 | 4699 | AF001160 | Homo sapiens G- | 352 | 100 |
| | | | protein gamma | | |
| | | | subunit | | |
| 149 | 4706 | X70070 | Homo sapiens | 2161 | 100 |
| | 4707 | | neurotensin | | |
| | 4708 | | receptor | | |
| | 4709 | | | | |
| 150 | 4745 | AC016041 | Arabidopsis | 146 | 44 |
| | 4746 | | thaliana F27J15.6 | | |
| | 4747 | | | | |
| | 4748 | | | | |
| | 4749 | | | | |
| 151 | 4752 | Y10696 | Homo sapiens INE1 | 280 | 98 |
| 152 | 4765 | D13744 | Holotrichia | 87 | 43 |
| | 4766 | | diomphalia | | |
| | 4767 | | holotricin 3 | | |
| 153 | 4768 | AB017112 | Mus musculus mCAC | 439 | 37 |
| | 4769 | | | | |
| 154 | 4773 | AF083116 | Homo sapiens | 396 | 39 |
| | | | paraneoplastic | | |
| | | | cancer-testis-brain | | |
| | | | antigen | | |
| 155 | 4774 | AF255733 | Drosophila | 123 | 32 |
| | | | melanogaster DNA | | |
| | | | topoisomerase III | | |
| | | | alpha | | |
| 156 | 4783 | AC005328 | Homo sapiens | 1180 | 95 |
| | | | R26660_1, partial | | |
| | | | CDS | | |
| 157 | 4804 | J00930 | Pseudopleuronectes | 91 | 45 |
| | | | americanus anti- | | |
| | | | freeze protein | | |
| 158 | 4811 | AF191653 | Homo sapiens | 793 | 90 |
| | | | diphosphoinositol | | |
| | | | polyphosphate | | |
| | | | phosphohydrolase | | |
| | | | type 2 beta | | |
| 159 | 4840 | U09366 | Homo sapiens zinc | 1339 | 54 |
| | | | finger protein | | |
| | | | ZNF133 | | |
| 160 | 4843 | AF067136 | Homo sapiens | 289 | 34 |
| | 4844 | | protein | | |
| | | | phosphatase-1 | | |
| | | | regulatory subunit | | |
| | | | 7 alpha2 | | |
| 161 | 4917 | Y12670 | Homo sapiens leptin | 666 | 95 |
| | 4918 | | receptor gene- | | |
| | | | related protein | | |
| 162 | 4929 | AC004022 | Homo sapiens | 347 | 52 |
| | | | Neurabin-like; | | |
| | | | similar to U72994 | | |
| | | | (PID:g2623757) | | |
| 163 | 4932 | U30903 | Klebsiella | 56 | 42 |
| | 4933 | | pneumoniae glycerol | | |
| | | | dehydratase large | | |
| | | | subunit | | |
| 164 | 4962 | D45920 | Rattus norvegicus | 665 | 42 |
| | 4963 | | 130kDa-Ins (1,4,5) P3 | | |
| | 4964 | | binding protein | | |
| | 4965 | | | | |
| | 4966 | | | | |
| | 4967 | | | | |
| 165 | 4989 | X79828 | Mus musculus NK10 | 2418 | 81 |
| 166 | 5080 | AL031658 | Homo sapiens | 668 | 100 |
| | 5081 | | dJ310O13.3 (novel | | |
| | | | protein) | | |
| 167 | 5452 | AF132984 | Homo sapiens | 553 | 87 |
| | 5453 | | nuclear pore | | |
| | 5454 | | complex interacting | | |
| | 5455 | | protein NPIP | | |
| | 5456 | | | | |
| | 5457 | | | | |
| | 5458 | | | | |
| | 5459 | | | | |
| 168 | 5452 | AF132984 | Homo sapiens | 561 | 89 |
| | 5453 | | nuclear pore | | |
| | 5454 | | complex interacting | | |
| | 5455 | | protein NPIP | | |
| | 5456 | | | | |
| | 5457 | | | | |
| | 5458 | | | | |
| | 5459 | | | | |
| 169 | 5452 | AF132984 | Homo sapiens | 577 | 82 |
| | 5453 | | nuclear pore | | |
| | 5454 | | complex interacting | | |
| | 5455 | | protein NPIP | | |
| | 5456 | | | | |
| | 5457 | | | | |
| | 5458 | | | | |
| | 5459 | | | | |
| 170 | 5452 | AF132984 | Homo sapiens | 553 | 87 |
| | 5453 | | nuclear pore | | |
| | 5454 | | complex interacting | | |
| | 5455 | | protein NPIP | | |
| | 5456 | | | | |
| | 5457 | | | | |
| | 5458 | | | | |
| | 5459 | | | | |
| 171 | 5780 | AF161371 | Homo sapiens | 912 | 99 |
| | 5781 | | HSPC253 | | |
| | 5782 | | | | |
| 172 | 5783 | AF100426 | Streptococcus | 134 | 20 |
| | 5784 | | parasanguinis | | |
| | 5785 | | fimbriae-associated | | |
| | 5786 | | protein Fap1 | | |
| | 5787 | | | | |
| | 5788 | | | | |
| | 5789 | | | | |
| | 5790 | | | | |
| | 5791 | | | | |
| 173 | 6785 | AF125387 | Drosophila | 225 | 33 |
| | | | melanogaster L82D | | |
| 174 | 7463 | L03427 | Homo sapiens | 609 | 48 |
| | | | basonuclin | | |
| 175 | 7637 | M36913 | Zea mays cell wall | 109 | 31 |
| | | | protein (put.); | | |
| | | | putative | | |
| 176 | 8090 | AK001750 | Homo sapiens | 2753 | 100 |
| | | | unnamed protein | | |
| | | | product | | |
| 177 | 8097 | AF200357 | Mus musculus | 1561 | 80 |
| | 8098 | | pantothenate kinase | | |
| | | | 1 beta | | |
| 178 | 8173 | U18922 | Saccharomyces | 417 | 42 |
| | | | cerevisiae Yer169wp | | |

[0389] TABLE 3

| SEQ ID | ACCESSION | | |
|---|---|---|---|
| NO: | NO. | DESCRIPTION | RESULTS* |
| 1 | PR00218 | PERIPHERIN (RDS)/ROM-1 | PR00218C 6.88 9.769e−09 142-163 |
| | | FAMILY SIGNATURE | |
| 2 | PR00757 | FLAVIN-CONTAINING | PR00757E 11.48 9.921e−06 203-223 |
| | | AMINE OXIDASE | |
| | | SIGNATURE | |
| 3 | BL00957 | NAD-dependent | BL00957A 8.31 9.870e−09 23-39 |
| | | glycerol-3-phosphate | |
| | | dehydrogenase | |
| | | proteins. | |
| 5 | BL00558 | Eukaryotic | BL00558B 20.25 8.071e−18 106-131 |
| | | mitochondrial porin | BL00558A 13.20 9.471e−14 82-96 |
| | | proteins. | |
| 6 | PR00515 | 5-HYDROXYTRYPTAMINE 1F | PR00515A 5.59 4.536e−06 26-40 |
| | | RECEPTOR SIGNATURE | |
| 7 | PF00797 | N-acetyltransferase. | PF00797A 14.57 1.000e−05 10-49 |
| 8 | PF01076 | Plasmid recombination | PF01076B 19.75 8.013e−09 843-873 |
| | | enzyme. | |
| 10 | PR00452 | SH3 DOMAIN SIGNATURE | PR00452D 17.02 2.688e−12 151-164 |
| | | | PR00452D 17.02 4.000e−11 47-60 |
| | | | PR00452B 11.65 8.962e−11 207-223 |
| | | | PR00452D 17.02 6.885e−09 238-251 |
| 11 | BL01065 | Electron transfer | BL01065E 31.58 6.400e−38 163-214 |
| | | flavoprotein beta- | BL01065D 18.61 9.250e−32 118-154 |
| | | subunit proteins. | BL01065C 16.45 8.125e−25 60-90 |
| | | | BL01065B 11.95 8.200e−16 38-55 |
| | | | BL01065A 10.81 8.714e−10 4-16 |
| 12 | PR00019 | LEUCINE-RICH REPEAT | PR00019A 11.19 3.667e−09 239-253 |
| | | SIGNATURE | |
| 13 | BL01172 | Ribosomal protein L44e | BL01172B 14.10 1.000e−40 25-67 |
| | | proteins. | BL01172C 16.78 8.615e−36 73-112 |
| | | | BL01172A 7.78 3.520e−13 12-23 |
| 14 | PF00637 | 7-fold repeat proteins | PF00637C 27.33 7.796e−06 4-51 |
| | | in Clathrin, also in | |
| | | VPS proteins. | |
| 15 | DM01117 | 2 kw TRANSPOSASE | DM01117B 13.11 8.333e−09 561-596 |
| | | WITHIN TRANSPOSITION | |
| | | VASOTOCIN. | |
| 16 | BL00540 | Ferritin iron-binding | BL00540A 15.06 8.636e−40 5-46 |
| | | regions proteins. | |
| 17 | PR00426 | C5A-ANAPHYLATOXIN | PR00426D 10.59 1.000e−05 213-225 |
| | | RECEPTOR SIGNATURE | |
| 18 | PR00551 | 2-S GLOBULIN FAMILY | PR00551F 6.10 7.583e−07 547-570 |
| | | SIGNATURE | |
| 19 | PR00652 | 5-HYDROXYTRYPTAMINE 7 | PR00652C 8.31 8.282e−06 54-74 |
| | | RECEPTOR SIGNATURE | |
| 20 | BL00405 | 43 Kd postsynaptic | BL00405E 8.84 8.800e−06 65-91 |
| | | protein. | |
| 21 | PD01966 | TRANSFERASE | PD01966B 22.84 8.953e−24 140-181 |
| | | GLYCOSYLTRANSFERASE. | PD01966C 20.75 6.478e−20 197-231 |
| | | | PD01966A 9.27 8.971e−13 40-51 |
| | | | PD01966D 19.10 8.714e−09 250-291 |
| 22 | PR00679 | PROHIBITIN SIGNATURE | PR00679D 11.91 5.500e−17 134-151 |
| | | | PR00679C 14.44 6.714e−16 111-130 |
| | | | PR00679B 13.63 1.900e−15 88-108 |
| | | | PR00679A 14.03 4.984e−12 70-87 |
| 23 | PR00459 | PLANT ASCORBATE | PR00459B 17.76 5.615e−09 426-442 |
| | | PEROXIDASE SIGNATURE | |
| 25 | PR00837 | ALLERGEN V5/TPX-1 | PR00837C 17.21 8.364e−21 135-152 |
| | | FAMILY SIGNATURE | PR00837A 14.77 6.294e−14 58-77 |
| | | | PR00837D 11.12 6.192e−12 170-184 |
| | | | PR00837B 11.64 1.429e−11 113-127 |
| 26 | BL00126 | 3′5′-cyclic nucleotide | BL00126C 22.07 7.103e−08 683-724 |
| | | phosphodiesterases | |
| | | proteins. | |
| 27 | PR00166 | AROMATIC AMINO ACID | PR00166I 11.06 1.000e−05 98-118 |
| | | PERMEASE SIGNATURE | |
| 28 | BL01104 | Ribosomal protein L13e | BL01104A 14.65 1.000e−40 13-52 |
| | | proteins. | BL01104B 15.12 1.000e−40 83-130 |
| | | | BL01104C 15.14 9.550e−28 174-202 |
| 29 | PR00338 | TRANSCRIPTION | PR00338A 11.51 1.000e−05 110-123 |
| | | TERMINATION FACTOR | |
| | | NUSG SIGNATURE | |
| 30 | PR00705 | PAPAIN CYSTEINE | PR00705C 11.87 3.647e−09 42-49 |
| | | PROTEASE (C1) FAMILY | |
| | | SIGNATURE | |
| 31 | DM00215 | PROLINE-RICH | DM00215 19.43 7.632e−16 853-886 |
| | | PROTEIN 3. | DM00215 19.43 1.196e−13 854-887 |
| | | | DM00215 19.43 1.188e−12 852-885 |
| | | | DM00215 19.43 6.063e−12 859-892 |
| | | | DM00215 19.43 9.250e−12 849-882 |
| | | | DM00215 19.43 9.438e−12 856-889 |
| | | | DM00215 19.43 2.059e−11 851-884 |
| | | | DM00215 19.43 7.176e−11 855-888 |
| | | | DM00215 19.43 2.607e−10 850-883 |
| | | | DM00215 19.43 4.536e−10 860-893 |
| | | | DM00215 19.43 3.136e−09 848-881 |
| | | | DM00215 19.43 7.712e−09 858-891 |
| | | | DM00215 19.43 9.847e−09 841-874 |
| | | | DM00215 19.43 1.000e−08 836-869 |
| 32 | DM00215 | PROLINE-RICH | DM00215 19.43 7.632e−16 813-846 |
| | | PROTEIN 3. | DM00215 19.43 1.196e−13 814-847 |
| | | | DM00215 19.43 1.188e−12 812-845 |
| | | | DM00215 19.43 6.063e−12 819-852 |
| | | | DM00215 19.43 9.250e−12 809-842 |
| | | | DM00215 19.43 9.438e−12 816-849 |
| | | | DM00215 19.43 2.059e−11 811-844 |
| | | | DM00215 19.43 7.176e−11 815-848 |
| | | | DM00215 19.43 2.607e−10 810-843 |
| | | | DM00215 19.43 4.536e−10 820-853 |
| | | | DM00215 19.43 3.136e−09 808-841 |
| | | | DM00215 19.43 7.712e−09 818-851 |
| | | | DM00215 19.43 9.847e−09 801-834 |
| | | | DM00215 19.43 1.000e−08 796-829 |
| 33 | BL00832 | 2′-5′-oligoadenylate | BL00832C 16.18 9.143e−09 199-254 |
| | | synthetases proteins. | |
| 34 | BL00224 | Clathrin light chain | BL00224B 16.94 6.236e−09 247-300 |
| | | proteins. | |
| 35 | PR00258 | SPERACT RECEPTOR | PR00258A 11.46 5.721e−11 436-453 |
| | | SIGNATURE | PR00258E 13.33 7.000e−11 414-427 |
| | | | PR00258E 13.33 9.250e−l1 133-146 |
| | | | PR00258B 9.63 2.180e−10 345-357 |
| | | | PR00258C 9.05 2.469e−10 360-371 |
| | | | PR00258A 11.46 2.746e−10 326-343 |
| | | | PR00258D 14.41 4.724e−10 391-406 |
| | | | PR00258B 9.63 6.311e−10 64-76 |
| | | | PR00258D 14.41 7.429e−09 507-522 |
| 36 | PR00503 | BROMODOMAIN SIGNATURE | PR00503A 14.39 9.827e−06 74-88 |
| 37 | PF00602 | Influenza RNA- | PF00602J 9.52 9.336e−07 65-120 |
| | | dependant RNA | |
| | | polymerase subunit | |
| | | PB1. | |
| 38 | PR00909 | BACTERIAL PERIPLASMIC | PR00909F 13.40 1.000e−05 14-29 |
| | | SPERMIDINE/PUTRESCINE- | |
| | | BINDING PROTEIN | |
| | | SIGNATURE | |
| 40 | BL00412 | Neuromodulin (GAP-43) | BL00412D 16.54 2.636e−11 171-222 |
| | | proteins. | BL00412D 16.54 6.318e−11 169-220 |
| | | | BL00412D 16.54 6.420e−11 170-221 |
| | | | BL00412D 16.54 3.543e−10 168-219 |
| | | | BL00412D 16.54 4.522e−10 167-218 |
| | | | BL00412D 16.54 1.918e−09 166-217 |
| | | | BL00412D 16.54 2.561e−09 173-224 |
| | | | BL00412D 16.54 3.020e−09 172-223 |
| | | | BL00412D 16.54 4.122e−09 161-212 |
| | | | BL00412D 16.54 4.673e−09 162-213 |
| | | | BL00412D 16.54 5.867e−09 165-216 |
| | | | BL00412D 16.54 6.418e−09 177-228 |
| | | | BL00412D 16.54 9.724e−09 163-214 |
| 41 | PR00611 | ERYTHROCRUORIN FAMILY | PR00611A 15.91 5.829e−09 26-49 |
| | | SIGNATURE | |
| 43 | PF00227 | Proteasome A-type and | PF00227 14.68 5.950e−09 16-28 |
| | | B-type. | |
| 44 | BL00224 | Clathrin light chain | BL00224B 16.94 9.182e−09 322-375 |
| | | proteins. | |
| 45 | PR00168 | SLOW VOLTAGE-GATED | PR00168C 6.76 9.124e−06 45-60 |
| | | POTASSIUM CHANNEL | |
| | | SIGNATURE | |
| 46 | PR00131 | GLYCOSYL HYDROLASE | PR0031D 14.81 1.000e−11-351-369 |
| | | FAMILY 1 SIGNATURE | |
| 47 | PD02182 | THREONINE SYNTHASE | PD02182D 19.97 3.368e−22 27-79 |
| | | BIOSYNTHESIS LYASE P. | PD02182E 15.74 3.558e−13 96-142 |
| | | | PD02182F 15.26 9.060e−10 151-167 |
| 48 | BL00405 | 43 Kd postsynaptic | BL00405K 7.57 4.309e−06 105-145 |
| | | protein. | |
| 49 | BL00315 | Dehydrins proteins. | BL00315A 9.35 5.426e−10 77-105 |
| | | | BL00315A 9.35 4.493e−09 79-107 |
| 50 | PR00221 | CAULIMOVIRUS COAT | PR00221G 11.09 9.903e−06 4-17 |
| | | PROTEIN SIGNATURE | |
| 51 | PR00011 | TYPE III EGF-LIKE | PR00011D 14.03 1.551e−14 453-472 |
| | | SIGNATURE | PR00011B 13.08 5.119e−13 262-281 |
| | | | PR00011D 14.03 1.632e−12 291-310 |
| | | | PR00011D 14.03 5.105e−12 262-281 |
| | | | PR00011B 13.08 7.097e−12 453-472 |
| | | | PR00011B 13.08 9.274e−12 232-251 |
| | | | PR00011A 14.06 1.415e−11 453-472 |
| | | | PR00011B 13.08 1.554e−11 203-222 |
| | | | PR00011A 14.06 2.662e−11 291-310 |
| | | | PR00011D 14.03 3.508e−11 203-222 |
| | | | PR00011D 14.03 4.984e−11 320-339 |
| | | | PR00011D 14.03 1.138e−10 232-251 |
| | | | PR00011B 13.08 2.696e−10 291-310 |
| | | | PR00011B 13.08 4.261e−10 320-339 |
| | | | PR00011A 14.06 6.739e−10 262-281 |
| | | | PR00011A 14.06 2.233e−09 203-222 |
| | | | PR00011A 14.06 6.671e−09 232-251 |
| | | | PR00011A 14.06 8.890e−09 320-339 |
| 52 | PR00320 | G-PROTEIN BETA WD-40 | PR00320B 12.19 3.571e−10 291-306 |
| | | REPEAT SIGNATURE | PR00320A 16.74 7.882e−10 291-306 |
| | | | PR00320C 13.01 3.700e−09 291-306 |
| | | | PR00320A 16.74 7.366e−09 136-151 |
| 53 | PR00320 | G-PROTEIN BETA WD-40 | PR00320B 12.19 3.571e−10 223-238 |
| | | REPEAT SIGNATURE | PR00320A 16.74 7.882e−10 223-238 |
| | | | PR00320C 13.01 3.700e−09 223-238 |
| | | | PR00320A 16.74 7.366e−09 136-151 |
| 54 | BL00319 | Amyloidogenic | BL00319C 17.12 7.857e−12 141-175 |
| | | glycoprotein | BL00319C 17.12 1.500e−10 138-172 |
| | | extracellular domain | BL00319C 17.12 7.875e−10 140-174 |
| | | proteins. | BL00319C 17.12 9.375e−10 144-178 |
| | | | BL00319C 17.12 1.947e−09 137-171 |
| | | | BL00319C 17.12 4.316e−09 136-170 |
| | | | BL00319C 17.12 6.329e−09 146-180 |
| | | | BL00319C 17.12 6.447e−09 147-181 |
| | | | BL00319C 17.12 8.461e−09 142-176 |
| 55 | BL00479 | Phorbol esters/ | BL00479A 19.86 9.617e−09 450-473 |
| | | diacylglycerol binding | |
| | | domain proteins. | |
| 56 | BL00785 | 5′-nucleotidase | BL00785B 10.65 2.612e−06 5-19 |
| | | proteins. | |
| 57 | PF00651 | BTB (also known as BR- | PF00651 15.00 9.053e−11 213-226 |
| | | C/Ttk) domain | |
| | | proteins. | |
| 58 | PF00803 | 3A movement protein. | PF00803D 14.15 3.757e−06 155-185 |
| 59 | PR00388 | 3′,5′-CYCLIC | PR00388A 10.45 2.530e−06 116-135 |
| | | NUCLEOTIDE CLASS II | |
| | | PHOSPHODIESTERASE | |
| | | SIGNATURE | |
| 60 | PR00388 | 3′,5′-CYCLIC | PR00388A 10.45 2.530e−06 93-112 |
| | | NUCLEOTIDE CLASS II | |
| | | PHOSPHODIESTERASE | |
| | | SIGNATURE | |
| 61 | PR00985 | LEUCYL-TRNA SYNTHETASE | PR00985F 13.02 9.109e−06 59-82 |
| | | SIGNATURE | |
| 62 | DM01688 | 2 POLY-IG RECEPTOR. | DM01688B 15.06 4.331e−07 52-100 |
| 63 | DM01418 | 352 FIBRILLAR COLLAGEN | DM01418C 20.48 3.310e−06 141-183 |
| | | CARBOXYL-TERMINAL. | |
| 64 | PR00068 | Cu-Zn-SUPEROXIDE | PR00068D 12.35 7.000e−32 171-198 |
| | | DISMUTASE FAMILy | PR00068A 13.56 6.824e−29 91-114 |
| | | SIGNATURE | PR00068C 16.81 8.875e−23 146-169 |
| | | | PR00068B 11.21 2.000e−13 127-137 |
| 65 | PR00010 | TYPE II EGF-LIKE | PR00010C 11.16 4.857e−09 154-165 |
| | | SIGNATURE | |
| 66 | PR00051 | BACTERIAL CHROMOSOMAL | PR00051A 10.68 8.180e−09 204-225 |
| | | REPLICATION INITIATOR | |
| | | (DNAA) SIGNATURE | |
| 67 | PR00533 | MAS ONCOGENE SIGNATURE | PR00533G 8.22 1.000e−05 17-35 |
| 69 | BL00038 | Myc-type, ‘helix-loop- | BL00038B 16.97 1.000e−14 108-129 |
| | | helix’ dimerization | |
| | | domain proteins. | |
| 70 | DM01389 | 4 TO B SIMILAR. | DM01389B 9.66 5.500e−06 25-35 |
| 71 | DM01389 | 4 TO B SIMILAR. | DM01389C 17.52 3.937e−06 158-184 |
| 74 | PR00515 | 5-HYDROXYTRYPTAMINE 1F | PR00515D 7.91 7.485e−06 158-178 |
| | | RECEPTOR SIGNATURE | |
| 75 | PR00683 | SPECTRIN PLECKSTRIN | PR00683D 15.87 4.339e−10 128-147 |
| | | HOMOLOGY DOMAIN | |
| | | SIGNATURE | |
| 76 | BL01115 | GTP-binding nuclear | BL01115A 10.22 9.518e−10 9-53 |
| | | protein ran proteins. | |
| 77 | PD02407 | 3-BISPHOSPHOGLYCERATE- | PD02407F 7.61 8.759e−06 20-34 |
| | | INDEPENDENT | |
| | | PHOSPHOGLYCER. | |
| 78 | PF00992 | Troponin. | PF00992A 16.67 7.987e−09 157-192 |
| 79 | PR00927 | ADENINE NUCLEOTIDE | PR00927E 14.93 6.760e−09 20-42 |
| | | TRANSLOCATOR 1 | |
| | | SIGNATURE | |
| 80 | PR00538 | MUSCARINIC M1 RECEPTOR | PR00538E 6.80 5.755e−09 88-105 |
| | | SIGNATURE | |
| 81 | BL01282 | BIR repeat proteins. | BL01282B 30.49 8.457e−09 918-957 |
| 82 | PF00084 | Sushi domain proteins | PF00084A 5.72 9.357e−06 38-43 |
| | | (SCR repeat proteins. | |
| 83 | PR00439 | 11-S SEED STORAGE | PR00439C 15.32 7.341e−06 32-53 |
| | | PROTEIN FAMILY | |
| | | SIGNATURE | |
| 84 | PR00568 | DOPAMINE D3 RECEPTOR | PR00568G 13.95 3.933e−09 134-148 |
| | | SIGNATURE | |
| 85 | BL00048 | Protamine P1 proteins. | BL00048 6.39 2.059e−12 42-69 |
| | | | BL00048 6.39 4.971e−12 44-71 |
| | | | BL00048 6.39 8.941e−12 28-55 |
| | | | BL00048 6.39 3.375e−11 64-91 |
| | | | BL00048 6.39 5.375e−11 67-94 |
| | | | BL00048 6.39 6.250e−11 46-73 |
| | | | BL00048 6.39 7.750e−11 66-93 |
| | | | BL00048 6.39 9.500e−11 37-64 |
| | | | BL00048 6.39 9.500e−11 51-78 |
| | | | BL00048 6.39 9.875e−11 36-63 |
| | | | BL00048 6.39 7.276e−10 54-81 |
| | | | BL00048 6.39 8.342e−10 74-101 |
| | | | BL00048 6.39 8.816e−10 47-74 |
| | | | BL00048 6.39 9.408e−10 52-79 |
| | | | BL00048 6.39 1.000e−09 56-83 |
| | | | BL00048 6.39 1.113e−09 72-99 |
| | | | BL00048 6.39 1.225e−09 61-88 |
| | | | BL00048 6.39 1.900e−09 83-110 |
| | | | BL00048 6.39 2.575e−09 40-67 |
| | | | BL00048 6.39 2.913e−09 45-72 |
| | | | BL00048 6.39 4.038e−09 58-85 |
| | | | BL00048 6.39 4.038e−09 62-89 |
| | | | BL00048 6.39 4.488e−09 39-66 |
| | | | BL00048 6.39 4.713e−09 68-95 |
| | | | BL00048 6.39 4.938e−09 80-107 |
| | | | BL00048 6.39 6.513e−09 38-65 |
| | | | BL00048 6.39 6.963e−09 53-80 |
| | | | BL00048 6.39 7.075e−09 69-96 |
| | | | BL00048 6.39 7.300e−09 77-104 |
| | | | BL00048 6.39 7.638e−09 75-102 |
| | | | BL00048 6.39 9.213e−09 65-92 |
| | | | BL00048 6.39 9.550e−09 63-90 |
| | | | BL00048 6.39 9.888e−09 81-108 |
| 87 | DM01111 | 4 kw PHOSPHATASE | DM01111D 16.76 9.578e−07 87-133 |
| | | TRANSFORMING 61K PDF1. | |
| 88 | PR00515 | 5-HYDROXYTRYPTAMINE 1F | PR00515E 5.80 5.852e−06 157-173 |
| | | RECEPTOR SIGNATURE | |
| 89 | PR00217 | 43 KD POSTSYNAPTIC | PR00217D 4.43 4.833e−06 53-70 |
| | | PROTEIN SIGNATURE | |
| 90 | BL01019 | ADP-ribosylation | BL01019C 12.52 1.692e−09 352-378 |
| | | factors family | |
| | | proteins. | |
| 91 | BL00783 | Ribosomal protein L13 | BL00783C 22.43 6.559e−24 117-147 |
| | | proteins. | BL00783A 14.55 1.600e−19 38-63 |
| | | | BL00783B 12.76 3.500e−12 104-116 |
| 92 | PR00300 | ATP-DEPENDENT CLP | PR00300A 9.56 7.896e−09 6-25 |
| | | PROTEASE ATP-BINDING | |
| | | SUBUNIT SIGNATURE | |
| 93 | PR00515 | 5-HYDROXYTRYPTAMINE 1F | PR00515G 10.77 5.455e−06 43-62 |
| | | RECEPTOR SIGNATURE | |
| 94 | BL00431 | Small hydrophilic | BL00431B 8.40 9.869e−06 98-135 |
| | | plant seed proteins. | |
| 95 | BL00412 | Neuromodulin (GAP-43) | BL00412D 16.54 7.359e−10 9-60 |
| | | proteins. | BL00412D 16.54 5.224e−09 14-65 |
| 96 | DM01415 | 6 SALIVARY GLUE | DM01415A 6.65 4.960e−08 27-40 |
| | | PROTEIN. | |
| 97 | DM01415 | 6 SALIVARY GLUE | DM01415A 6.65 4.960e−08 27-40 |
| | | PROTEIN. | |
| 98 | BL00636 | Nt-dnaJ domain | BL00636A 8.07 7.319e−09 111-128 |
| | | proteins. | |
| 99 | PR00500 | POLYCYSTIC KIDNEY | PR00500A 5.70 9.740e−09 345-364 |
| | | DISEASE PROTEIN | |
| | | SIGNATURE | |
| 100 | PF00992 | Troponin. | PF00992A 16.67 2.539e−09 100-135 |
| 101 | DM01857 | 5 kw NUCLEOSIDE | DM01857B 14.94 8.752e−07 132-160 |
| | | TRANSPORT DEPENDENT | |
| | | NA. | |
| 102 | PR00449 | TRANSFORMING PROTEIN | PR00449A 13.20 9.471e−19 5-27 |
| | | P21 RAS SIGNATURE | PR00449E 13.50 3.520e−14 148-171 |
| | | | PR00449C 17.27 5.846e−11 45-68 |
| 103 | DM00588 | 8 kw CHO2 ALPHA | DM00588B 9.45 7.462e−07 273-283 |
| | | ANTIGEN PARAMYOSIN. | |
| 104 | PR00019 | LEUCINE-RICH REPEAT | PR00019B 11.36 9.357e−12 298-312 |
| | | SIGNATURE | PR00019A 11.19 2.350e−11 301-315 |
| | | | PRO0019B 11.36 1.360e−09 275-289 |
| 105 | BL00415 | Synapsins proteins. | BL00415N 4.29 8.358e−09 318-362 |
| | | | BL00415N 4.29 8.423e−09 306-350 |
| | | | BL00415N 4.29 9.409e−09 320-364 |
| 110 | PR00516 | 5-HYDROXYTRYPTAMINE 2A | PR00516E 14.87 8.185e−06 61-79 |
| | | RECEPTOR SIGNATURE | |
| 111 | PR00787 | STREPTOMYCES | PR00787E 11.66 1.000e−05 31-46 |
| | | EXTRACELLULAR NEUTRAL | |
| | | PROTEINASE (M7) FAMILY | |
| | | SIGNATURE | |
| 112 | PR00319 | BETA G-PROTEIN | PR00319A 15.27 8.377e−09 291-308 |
| | | (TRANSDUCIN) SIGNATURE | |
| 113 | PR00795 | RYANODINE RECEPTOR | PR00795C 6.30 1.000e−05 59-84 |
| | | SIGNATURE | |
| 114 | PR00534 | MELANOCORTIN RECEPTOR | PR00534A 11.49 5.629e−09 358-371 |
| | | FAMILY SIGNATURE | |
| 116 | BL00198 | 4Fe-4S ferredoxins, | BL00198 10.43 2.731e−06 195-207 |
| | | iron-sulfur binding | |
| | | region proteins. | |
| 117 | DM01688 | 2 POLY-IG RECEPTOR. | DM01688B 15.06 2.559e−07 14-62 |
| 118 | DM00895 | 7 kw REVERSE | DM00895B 8.85 8.448e−07 1699-1709 |
| | | TRANSCRIPTASE RNA | |
| | | POLYMERASE. | |
| 119 | PR00320 | G-PROTEIN BETA WD-40 | PR00320A 16.74 4.732e−09 66-81 |
| | | REPEAT SIGNATURE | PR00320C 13.01 8.500e−09 66-81 |
| 120 | DM01111 | 4 kw PHOSPHATASE | DM01111D 16.76 9.016e−07 38-84 |
| | | TRANSFORMING 61K PDF1. | |
| 121 | PR00320 | G-PROTEIN BETA WD-40 | PR00320A 16.74 1.000e−11 107-122 |
| | | REPEAT SIGNATURE | PR00320C 13.01 6.087e−11 107-122 |
| | | | PR00320B 12.19 7.975e−09 107-122 |
| 122 | DM00973 | 3 kw RESISTANCE | DM00973A 21.17 8.545e−06 102-139 |
| | | BENOMYL YLL028W | |
| | | CYCLOHEXIMIDE. | |
| 123 | PR00503 | BROMODOMAIN SIGNATURE | PR00503D 20.81 1.409e−18 421-441 |
| | | | PR00503B 9.96 7.750e−15 94-111 |
| | | | PR00503C 19.84 1.720e−15 110-129 |
| | | | PR00503A 14.39 6.824e−13 78-92 |
| | | | PR00503B 9.96 4.400e−12 387-404 |
| | | | PR00503D 20.81 1.188e−11 128-148 |
| | | | PR00503C 19.84 1.000e−08 403-422 |
| 124 | BL00740 | MAM domain proteins. | BL00740C 15.93 1.000e−05 279-290 |
| 125 | PR00131 | GLYCOSYL HYDROLASE | PR00131B 12.88 9.857e−06 71-80 |
| | | FAMILY 1 SIGNATURE | |
| 126 | BL00319 | Amyloidogenic | BL00319C 17.12 9.597e−11 1914-1948 |
| | | glycoprotein | BL00319C 17.12 8.625e−10 1919-1953 |
| | | extracellular domain | BL00319C 17.12 9.053e−09 1918-1952 |
| | | proteins. | |
| 127 | BL00319 | Amyloidogenic | BL00319C 17.12 9.597e−11 1914-1948 |
| | | glycoprotein | BL00319C 17.12 8.625e−10 1919-1953 |
| | | extracellular domain | BL00319C 17.12 9.053e−09 1918-1952 |
| | | proteins. | |
| 128 | PR00651 | 5-HYDROXYTRYPTAMINE 2B | PR00651G 12.73 8.500e−06 94-116 |
| | | RECEPTOR SIGNATURE | |
| 129 | PF00013 | KH domain proteins | PF00013 5.78 3.118e−10 368-380 |
| | | family of RNA binding | PF00013 5.78 5.500e−09 176-188 |
| | | proteins. | |
| 130 | PD02407 | 3-BISPHOSPHOGLYCERATE- | PD02407I 17.34 2.256e−07 797-823 |
| | | INDEPENDENT | |
| | | PHOSPHOGLYCER. | |
| 131 | PR00938 | BRACHYURY PROTEIN | PR00938C 8.28 9.740e−06 15-33 |
| | | FAMILY SIGNATURE | |
| 132 | PR00449 | TRANSFORMING PROTEIN | PR00449D 10.79 3.182e−09 104-118 |
| | | P21 RAS SIGNATURE | PR00449E 13.50 6.357e−09 139-162 |
| | | | PR00449B 14.34 7.900e−09 19-36 |
| 133 | PF00506 | Influenza virus | PF00506I 10.26 8.639e−06 3-39 |
| | | nucleoprotein. | |
| 134 | DM01111 | 4 kw PHOSPHATASE | DM01111E 17.28 3.550e−06 1168-1217 |
| | | TRANSFORMING 61K PDF1. | |
| 135 | DM01023 | 2 GLYCOSYL HYDROLASES | DM01023B 13.81 2.627e−06 282-296 |
| | | FAMILY 5. | |
| 136 | PR00132 | GLYCOSYL HYDROLASE | PR00132A 13.45 9.753e−06 164-180 |
| | | FAMILY 2 SIGNATURE | |
| 137 | PR00171 | SUGAR TRANSPORTER | PR00171D 12.76 1.794e−18 375-397 |
| | | SIGNATURE | PR00171B 14.73 3.143e−11 124-144 |
| | | | PR00171C 10.97 3.813e−11 267-278 |
| | | | PR00171E 14.87 4.000e−09 398-411 |
| 138 | PR00171 | SUGAR TRANSPORTER | PR00171D 12.76 1.794e−18 306-328 |
| | | SIGNATURE | PR00171C 10.97 3.813e−11 198-209 |
| | | | PR00171E 14.87 4.000e−09 329-342 |
| 139 | BL01115 | GTP-binding nuclear | BL01115B 10.81 7.612e−11 102-146 |
| | | protein ran proteins. | BL01115A 10.22 7.672e−09 22-66 |
| 140 | BL01115 | GTP-binding nuclear | BL01115B 10.81 7.612e−11 102-146 |
| | | protein ran proteins. | BL01115B 10.81 6.824e−10 404-448 |
| | | | BL01115A 10.22 7.672e−09 22-66 |
| 141 | BL01115 | GTP-binding nuclear | BL01115B 10.81 7.612e−11 102-146 |
| | | protein ran proteins. | BL01115B 10.81 6.824e−10 404-448 |
| | | | BL01115A 10.22 7.672e−09 22-66 |
| | | | BL01115A 10.22 7.672e−09 563-607 |
| 142 | DM01389 | 4 TO B SIMILAR. | DM01389B 9.66 5.800e−07 85-95 |
| 144 | PD02939 | PROTEIN GLUTATHIONE | PD02939B 10.10 2.723e−12 203-220 |
| | | SYNTHETASE SY. | PD02939C 20.01 1.000e−11 224-252 |
| 145 | BL01154 | RNA polymerases L / 13 | BL01154B 24.55 9.722e−06 4-40 |
| | | to 16 Kd subunits | |
| | | proteins. | |
| 146 | DM01688 | 2 POLY-IG RECEPTOR. | DM01688A 15.63 5.116e−06 72-119 |
| 147 | DM00215 | PROLINE-RICH | DM00215 19.43 8.059e−11 261-294 |
| | | PROTEIN 3. | DM00215 19.43 4.051e−09 259-292 |
| 148 | PR00321 | GAMMA G-PROTEIN | PR00321C 15.39 4.643e−15 47-65 |
| | | (TRANSDUCIN) SIGNATURE | PR00321A 11.91 3.769e−13 11-27 |
| | | | PR00321B 12.62 4.566e−10 27-42 |
| 149 | PR00237 | RHODOPSIN-LIKE GPCR | PR00237G 19.63 2.800e−15 346-373 |
| | | SUPERFAMILY SIGNATURE | PR00237F 13.57 4.429e−15 301-326 |
| | | | PR00237D 8.94 1.900e−11 184-206 |
| | | | PR00237B 13.50 5.966e−11 101-123 |
| | | | PR00237A 11.48 2.667e−10 65-90 |
| | | | PR00237C 15.69 6.657e−10 148-171 |
| | | | PR00237E 13.03 3.382e−09 237-261 |
| 150 | BL00219 | Anion exchangers | BL00219O 14.02 1.000e−05 108-148 |
| | | family proteins. | |
| 151 | PR00388 | 3′,5′-CYCLIC | PR00388A 10.45 6.400e−06 16-35 |
| | | NUCLEOTIDE CLASS II | |
| | | PHOSPHODIESTERASE | |
| | | SIGNATURE | |
| 152 | BL00370 | PEP-utilizing enzymes | BL00370D 22.48 9.110e−06 114-141 |
| | | phosphorylation site | |
| | | proteins proteins. | |
| 153 | PR00927 | ADENINE NUCLEOTIDE | PR00927E 14.93 9.640e−09 212-234 |
| | | TRANSLOCATOR 1 | |
| | | SIGNATURE | |
| 154 | BL00420 | Speract receptor | BL00420A 20.42 7.492e−10 153-182 |
| | | repeat proteins domain | BL00420A 20.42 4.046e−09 159-188 |
| | | proteins. | BL00420A 20.42 4.462e−09 165-194 |
| | | | BL00420A 20.42 9.169e−09 171-200 |
| 155 | DM01803 | 1 HERPESVIRUS | DM01803A 10.51 5.374e−06 266-287 |
| | | GLYCOPROTEIN H. | |
| 156 | DM00066 | 835 CPL REPEAT. | DM00066A 8.76 8.821e−06 190-204 |
| 157 | PR00456 | RIBOSOMAL PROTEIN P2 | PR00456E 3.06 8.125e−10 245-260 |
| | | SIGNATURE | PR00456E 3.06 8.125e−10 246-261 |
| | | | PR00456E 3.06 9.772e−09 247-262 |
| 158 | PR00502 | MUTT DOMAIN SIGNATURE | PR00502A 15.06 4.818e−09 45-60 |
| | | | PR00502B 15.92 5.071e−09 59-75 |
| 159 | PR00048 | C2H2-TYPE ZINC FINGER | PR00048A 10.52 8.500e−14 302-316 |
| | | SIGNATURE | PR00048A 10.52 6.143e−13 470-484 |
| | | | PR00048A 10.52 9.357e−13 414-428 |
| | | | PR00048A 10.52 3.647e−12 358-372 |
| | | | PR00048A 10.52 1.947e−11 442-456 |
| | | | PR00048A 10.52 2.895e−11 526-540 |
| | | | PR00048A 10.52 5.263e−11 386-400 |
| | | | PR00048A 10.52 8.105e−11 274-288 |
| | | | PR00048B 6.02 9.308e−11 402-412 |
| | | | PR00048A 10.52 6.870e−10 498-512 |
| | | | PR00048A 10.52 7.261e−10 330-344 |
| | | | PR00048B 6.02 1.474e−09 514-524 |
| | | | PR00048B 6.02 4.789e−09 374-384 |
| | | | PR00048B 6.02 6.211e−09 318-328 |
| | | | PR00048B 6.02 9.526e−09 486-496 |
| | | | PR00048B 6.02 1.000e−08 542-552 |
| 160 | PR00019 | LEUCINE-RICH REPEAT | PR00019B 11.36 7.840e−09 221-235 |
| | | SIGNATURE | PR00019B 11.36 8.200e−09 177-191 |
| 161 | BL00166 | Enoyl-CoA | BL00166C 18.93 9.906e−06 90-117 |
| | | hydratase/isomerase | |
| | | proteins. | |
| 162 | BL00115 | Eukaryotic RNA | BL00115Z 3.12 4.441e−09 24-73 |
| | | polymerase II | BL00115Z 3.12 7.551e−09 31-80 |
| | | heptapeptide repeat | |
| | | proteins. | |
| 163 | PR00111 | ALPHA/BETA HYDROLASE | PR00111A 11.49 9.027e−06 16-32 |
| | | FOLD SIGNATURE | |
| 164 | PR00360 | C2 DOMAIN SIGNATURE | PR00360B 13.61 9.379e−12 615-629 |
| | | | PR00360A 14.59 7.395e−09 585-598 |
| 165 | PR00048 | C2H2-TYPE ZINC FINGER | PR00048A 10.52 7.545e−15 459-473 |
| | | SIGNATURE | PR00048A 10.52 4.750e−14 702-716 |
| | | | PR00048A 10.52 6.250e−14 590-604 |
| | | | PR00048A 10.52 7.000e−14 646-660 |
| | | | PR00048A 10.52 8.714e−13 618-632 |
| | | | PR00048A 10.52 2.059e−12 375-389 |
| | | | PR00048A 10.52 2.059e−12 403-417 |
| | | | PR00048A 10.52 2.059e−12 674-688 |
| | | | PR00048A 10.52 1.000e−11 487-501 |
| | | | PR00048B 6.02 5.846e−11 363-373 |
| | | | PR00048B 6.02 1.000e−10 634-644 |
| | | | PR00048A 10.52 2.174e−10 304-318 |
| | | | PR00048B 6.02 2.688e−10 718-728 |
| | | | PR00048B 6.02 4.375e−10 419-429 |
| | | | PR00048B 6.02 4.938e−10 690-700 |
| | | | PR00048B 6.02 6.063e−10 662-672 |
| | | | PR00048A 10.52 8.435e−10 431-445 |
| | | | PR00048B 6.02 2.421e−09 475-485 |
| | | | PR00048B 6.02 8.579e−09 320-330 |
| 167 | PR00462 | FUNGAL LIGNIN | PR00462N 11.80 9.645e−06 51-71 |
| | | PEROXIDASE FAMILY | |
| | | SIGNATURE | |
| 168 | PF01073 | 3-beta hydroxysteriod | PF01073A 18.01 1.000e−05 48-101 |
| | | dehydrogenase/isomerase | |
| | | family. | |
| 169 | DM00668 | ZEIN. | DM00668B 22.01 9.795e−06 101-153 |
| 170 | PR00462 | FUNGAL LIGNIN | PR00462N 11.80 9.645e−06 51-71 |
| | | PEROXIDASE FAMILY | |
| | | SIGNATURE | |
| 171 | PR00598 | BACTERIAL REGULATORY | PR00598D 16.48 6.434e−09 108-129 |
| | | PROTEIN MARR FAMILY | |
| | | SIGNATURE | |
| 172 | PR00679 | PROHIBITIN SIGNATURE | PR00679F 8.03 7.030e−09 14-38 |
| 173 | DM00066 | 835 CPL REPEAT. | DM00066H 15.93 3.483e−06 282-317 |
| 174 | BL00028 | Zinc finger, C2H2 | BL00028 16.07 1.514e−09 499-516 |
| | | type, domain proteins. | BL00028 16.07 4.086e−09 297-314 |
| 176 | PR00716 | M-PHASE INDUCER | PR00716C 17.65 9.386e−10 188-209 |
| | | PHOSPHATASE SIGNATURE | |
| 177 | BL00405 | 43 Kd postsynaptic | BL00405D 6.60 9.631e−09 208-251 |
| | | protein. | |
| 178 | DM01930 | 2 kw FINGER SMCX SMCY | DM01930F 14.16 5.018e−28 86-122 |
| | | YDR096W. | |

*Results include in order: accession number subtype; raw score; p-value; position of signature in amino acid sequence.

[0390] TABLE 4

| SEQ ID | | | | |
|---|---|---|---|---|
| NO: | pFAM NAME | DESCRIPTION | p-value | pFAM SCORE |
| 3 | ldh | lactate/malate | 6.9e−177 | 601.0 |
| | | dehydrogenase | | |
| 5 | Euk_porin | Eukaryotic porin | 5e−182 | 618.1 |
| 6 | Acetyltransf | Acetyltransferase | 0.0045 | 23.7 |
| | | (GNAT) family | | |
| 10 | SH2 | Src homology domain 2 | 5.5e−41 | 121.8 |
| 11 | ETF_beta | Electron transfer | 2.1e−125 | 430.0 |
| | | flavoprotein beta subunit | | |
| 12 | LRR | Leucine Rich Repeat | 1.2e−13 | 58.8 |
| 13 | Ribosomal_L44 | Ribosomal protein L44 | 1e−48 | 175.3 |
| 16 | ferritin | Ferritins | 1.1e−65 | 223.8 |
| 18 | FHA | FHA domain | 4.3e−21 | 83.5 |
| 20 | Clathrin_repeat | 7-fold repeat in | 0.0028 | 20.3 |
| | | Clathrin and VPS | | |
| 21 | TGT | Queuine tRNA- | 3.4e−19 | 77.2 |
| | | ribosyltransferase | | |
| 22 | Band_7 | Band 7 family | 1.3e−20 | 81.9 |
| 23 | MgtE | Divalent cation transporter | 8.7e−31 | 115.7 |
| 25 | SCP | SCP-like extracellular | 1.3e−40 | 148.3 |
| | | protein | | |
| 28 | Ribosomal_L13e | Ribosomal protein L13e | 3.3e−136 | 465.9 |
| 30 | RGS | Regulator of G protein | 5.2e−56 | 199.5 |
| | | signaling domain | | |
| 31 | ank | Ank repeat | 5.4e−26 | 99.8 |
| 32 | ank | Ank repeat | 5.4e−26 | 99.8 |
| 33 | zf-C3HC4 | Zinc finger, C3HC4 type | 1.8e−06 | 25.2 |
| | | (RING finger) | | |
| 35 | SRCR | Scavenger receptor | 5e−83 | 289.2 |
| | | cysteine−rich domain | | |
| 40 | LRRNT | Leucine rich repeat N- | 1.3e−05 | 32.1 |
| | | terminal domain | | |
| 41 | globin | Globin | 2.6e−47 | 169.4 |
| 42 | Calsequestrin | Calsequestrin | 0.012 | −70.6 |
| 43 | proteasome | Proteasome A-type and | 2.2e−64 | 227.3 |
| | | B-type | | |
| 44 | ig | Immunoglobulin domain | 0.00011 | 20.1 |
| 46 | Ribosomal_L6 | Ribosomal protein L6 | 322.6 | 4.5e−93 |
| 48 | ras | Ras family | 3e−11 | −8.9 |
| 52 | WD40 | WD domain, G-beta | 6.3e−16 | 66.3 |
| | | repeat | | |
| 53 | WD40 | WD domain, G-beta | 1.7e−17 | 71.6 |
| | | repeat | | |
| 54 | zf-C2HC | Zinc finger, C2HC type | 6.7e−100 | 345.3 |
| 55 | KRAB | KRAB box | 2.6e−34 | 127.4 |
| 56 | WD40 | WD domain, G-beta | 2.3e−15 | 64.5 |
| | | repeat | | |
| 57 | MATH | MATH domain | 5.7e−22 | 84.3 |
| 63 | Rhomboid | Rhomboid family | 0.024 | −12.6 |
| 64 | sodcu | Copper/zinc superoxide | 5.1e−98 | 320.0 |
| | | dismutase (SODC) | | |
| 65 | RNase_PH | 3′ exoribonuclease | 5.3e−53 | 189.5 |
| | | family | | |
| 66 | CARD | Caspase recruitment | 0.0035 | 18.6 |
| | | domain | | |
| 69 | HLH | Helix-loop-helix DNA- | 0.033 | 14.9 |
| | | binding domain | | |
| 75 | PH | PH domain | 4.8e−13 | 51.6 |
| 76 | arf | ADP-ribosylation | 0.014 | −84.2 |
| | | factor family | | |
| 77 | cofilin_ADF | Cofilin/tropomyosin- | 2.4e−06 | 34.5 |
| | | type actin-binding pr | | |
| 79 | mito_carr | Mitochondrial carrier | 1.3e−46 | 162.7 |
| | | proteins | | |
| 81 | zf-C3HC4 | Zinc finger, C3HC4 | 9.6e−08 | 29.4 |
| | | type (RING finger) | | |
| 87 | DUF130 | Protein of unknown | 0.011 | −56.5 |
| | | function | | |
| 90 | F-box | F-box domain. | 3.9e−05 | 30.5 |
| 91 | Ribosomal_L13 | Ribosomal protein L13 | 3.9e−62 | 219.8 |
| 98 | DnaJ | DnaJ domain | 0.081 | −2.7 |
| 102 | ras | Ras family | 2.3e−45 | 164.1 |
| 104 | LRR | Leucine Rich Repeat | 1.6e−16 | 68.3 |
| 112 | WD40 | WD domain, G-beta | 4.4e−26 | 100.1 |
| | | repeat | | |
| 114 | 7tm_1 | 7 transmembrane | 5e−36 | 116.6 |
| | | receptor (rhodopsin | | |
| | | family) | | |
| 119 | WD40 | WD domain, G-beta | 2.1e−05 | 31.4 |
| | | repeat | | |
| 121 | WD40 | WD domain, G-beta | 5.2e−10 | 46.7 |
| | | repeat | | |
| 123 | bromodomain | Bromodomain | 2e−85 | 297.2 |
| 124 | PH | PH domain | 3.1e−20 | 77.3 |
| 129 | KH-domain | KH domain | 4.9e−38 | 128.1 |
| 131 | dsrm | Double-stranded RNA | 8.8e−24 | 92.4 |
| | | binding motif | | |
| 132 | arf | ADP-ribosylation | 0.006 | −79.5 |
| | | factor family | | |
| 134 | Tropomyosin | Tropomyosins | 0.018 | 10.3 |
| 137 | sugar_tr | Sugar (and other) | 1.4e−110 | 380.8 |
| | | transporter | | |
| 138 | sugar_tr | Sugar (and other) | 1.5e−55 | 198.0 |
| | | transporter | | |
| 139 | ras | Ras family | 1.2e−20 | 82.1 |
| 140 | ras | Ras family | 3.4e−16 | 47.4 |
| 141 | ras | Ras family | 0.0041 | −101.4 |
| 146 | PH | PH domain | 1.1e−05 | 25.3 |
| 147 | HLH | Helix-loop-helix DNA- | 51.4 | 2e−11 |
| | | binding domain | | |
| 148 | G-gamma | G-protein gamma | 1.9e−34 | 127.9 |
| | | subunit. | | |
| 149 | 7tm_1 | 7 transmembrane | 1.1e−81 | 261.6 |
| | | receptor (rhodopsin | | |
| | | family) | | |
| 153 | mito_carr | Mitochondrial carrier | 1.6e−60 | 210.4 |
| | | proteins | | |
| 154 | Collagen | Collagen triple helix | 0.00023 | 21.9 |
| | | repeat (20 copies) | | |
| 158 | mutT | Bacterial mutT | 1.5e−07 | 31.6 |
| | | protein | | |
| 159 | KRAB | KRAB box | 6.1e−18 | 73.0 |
| 160 | LRR | Leucine Rich Repeat | 7e−18 | 72.8 |
| 162 | SAM | SAM domain (Sterile | 0.0027 | 21.1 |
| | | alpha motif) | | |
| 164 | efhand | EF hand | 0.0086 | 22.7 |
| 165 | zf-C2H2 | Zinc finger, C2H2 type | 5.5e−98 | 338.9 |
| 174 | zf-C2H2 | Zinc finger, C2H2 type | 3.2e−10 | 47.4 |

[0391] TABLE 5

| | POSITION OF SIGNAL | maxS | meanS |
|---|---|---|---|
| | IN AMINO ACID | (MAXIMUM | (MEAN |
| SEQ ID NO: | SEQUENCE | SCORE) | SCORE) |
| 1 | 1-26 | 0.990 | 0.790 |
| 25 | 1-21 | 0.955 | 0.698 |
| 35 | 1-25 | 0.989 | 0.949 |
| 39 | 1-34 | 0.962 | 0.819 |
| 42 | 1-29 | 0.970 | 0.862 |
| 48 | 1-16 | 0.978 | 0.960 |
| 51 | 1-43 | 0.966 | 0.620 |
| 83 | 1-34 | 0.950 | 0.550 |
| 110 | 1-30 | 0.961 | 0.793 |
| 114 | 1-23 | 0.989 | 0.977 |
| 161 | 1-26 | 0.981 | 0.843 |

The application's sequence listing, which the Patent Office published only in electronic form, follows.

SEQUENCE LISTING (178 sequences)

SEQ ID NO: 1 - DNA, 1542 bp, Homo sapiens
  CDS (187)..(1002)
atttggccctcgaggccaagaattcggcacgagcgagcagggtgcggcggcggcggggcgctccggggaggccaggacagctgatggttgtggcagaaacatctcaaggtagctggtccgcccccacttccccatctacctcttgtcctccccccaacaccaccaccaccctggctcccctccctcatgaccgcctggatcctcctgcctgtcagcctgtcagcgttctccatcactggcatatggactgtgtatgccatggctgtgatgaaccaccatgtatgccctgtggagaactggtcctacaacgagtcctgccctcctgaccctgctgagcaagggggtcccaagacctgctgcaccctggacgatgtccccctcatcagcaagtgtggctcctatcccccagaaagctgcctcttcagcctcattggcaacatgggtgctttcatggtggccctgatctgcctcctgcgctacgggcagctcctggagcagagtcggcactcttgggttaacaccacggcactcatcacaggctgcaccaacgctgcgggcctcttggtggttggcaactttcaggtggatcatgccaggtctctgcactacgttggagctggcgtggccttccctgcggggctgctctttgtttgcctgcactgtgctctctcctaccaaggggccaccgccccgctggacctggctgtggcctatctgcgaagtgtgctggctgtcatcgcctttatcaccctggtcctcagtggagtcttctttgtccatgagagttctcagctgcaacatggggcagccctgtgtgagtgggtgtgtgtcatcgatatcctcattttctatggcaccttcagctacgagtttggggcagtctcctcagacacactggtggctgcactgcagcctacccctggccgggcctgcaagtcctccgggagcagcagcacctccacccacctcaactgtgcccccgagagcatcgctatgatctaaggtctggggagggtggctggcccggcctccacagcaccccaccccatatcttctttccatttatttcgtaccaaaaacaattttgagaaagtattctgttgggatctgggcttcctcacttctggagaagtggccatcccatgcccacctgtgccatggaggagtgggccctgccagctgccacagctgcatgacctgcttccccaccccacggtgtcgttttgtttttaaaggtcacctgtcctcactcacccagccagcccttcaggtgccttctactcccagtgccaaagccagaccactggggtttcctgctgcaggaattgggggctgggaacagcagaggggatagaagtctggtggaggtggagtgggcacgccttagcctacggaaaggcccatttctgggcccactgagctgcactgggattcttcactctgcccctcacttcctttagggcaaataacacagcagaaccacgtgggtattttagtacttttttttatattaaaagaattctaatttgcaaaaaaaaaaaa

SEQ ID NO: 2 - DNA, 1182 bp, Homo sapiens
  CDS (157)..(870)
  misc_feature (1)...(1182): n = a,t,c or g
accatcgtccangtccncggattctccggcgcaccgtacgctgggacgtgtggtttcagctcgtgcgcctccttgtgggtttttgacgtttagcgactattgcgcctgcgccagcgccggctgcgagactggggccgtggctgctggtcccgggtgatgctaggcggctccctgggctccaggctgttgcggggtgtaggtgggagtcacggacggttcggggcccgaggtgtccgcgaaggtggcgcagccatggcggcaggggagagcatggctcagcggatggtctgggtggacctggagatgacaggattggacattgagaaggaccagattattgagatggcctgtctgataactgactctgatctcaacattttggctgaaggtcctaacctgattataaaacaaccagatgagttgctggacagcatgtcagattggtgtaaggagcatcacgggaagtctggccttaccaaggcagtgaaggagagtacaattacattgcagcaggcagagtatgaatttctgtcctttgtacgacagcagactcctccagggctctgtccacttgcaggaaattcagttcatgaagataagaagtttcttgacaaatacatgccccagttcatgaaacatcttcattatagaataattgatgtgagcactgttaaagaactgtgcagacgctggtatccagaagaatatgaatttgcaccaaagaaggctgcttctcatagggcacttgatgacattagtgaaagcatcaaagagcttcagttttaccgaaataacatcttcaagaaaaaaatagatgaaaagaagaggaaaattatagaaaatggggaaaatgagaagaccgtgagttgatgccagttatcatgctgccactacatcgttatctggaggcaacttctggtggtttttttttctcacgctgatggcttggcagagcaccttcggttaacttgcatctccagattgattactcaagcagacagcacacgaaatactatttttctcctaatatgctgtttccattatgacacagcagctcctttgtaagtaccaggtcatgtccatcccttggtacatatatgcatttgcttttaaaccatttcttttgtttaaataaataaataagtaaataaagctagttctattgaaatgcaaaaaaaaaaa

SEQ ID NO: 3 - DNA, 1385 bp, Homo sapiens
  CDS (169)..(1173)
tggccagggccccaatagaacccttttggaagctgtacgcctgcggtaccggtccggaattcccgggtcgacccacgcgtccgcccacgcgtccgcgcacgcagctgactttgtcttctccgcacgactgttacagaggtctccagagccttctctctcctgtgcaaaatggcaactcttaaggaaaaactcattgcaccagttgcggaagaagaggcaacagttccaaacaataagatcactgtagtgggtgttggacaagttggtatggcgtgtgctatcagcattctgggaaagtctctggctgatgaacttgctcttgtggatgttttggaagataagcttaaaggagaaatgatggatctgcagcatgggagcttatttcttcagacacctaaaattgtggcagataaagattattctgtgaccgccaattctaagattgtagtggtaactgcaggagtccgtcagcaagaaggggagagtcggctcaatctggtgcagagaaatgttaatgtcttcaaattcattattcctcagatcgtcaagtacagtcctgattgcatcataattgtggtttccaacccagtggacattcttacgtatgttacctggaaactaagtggattacccaaacaccgcgtgattggaagtggatgtaatctggattctgctagatttcgctaccttatggctgaaaaacttggcattcatcccagcagctgccatggatggattttgggggaacatggcgactcaagtgtggctgtgtggagtggtgtgaatgtggcaggtgtttctctccaggaattgaatccagaaatgggaactgacaatgatagtgaaaattggaaggaagtgcataagatggtggttgaaagtgcctatgaagtcatcaagctaaaaggatataccaactgggctattggattaagtgtggctgatcttattgaatccatgttgaaaaatctatccaggattcatcccgtgtcaacaatggtaaaggggatgtatggcattgagaatgaagtcttcctgagccttccatgtatcctcaatgcccggggattaaccagcgttatcaaccagaagctaaaggatgatgaggttgctcagctcaagaaaagtgcagataccctgtgggacatccagaaggacctaaaagacctgtgactagtgagctctaggctgtagaaatttaaaaactacaatgtgattaactcgagcctttagttttcatccatgtacatggatcacagtttgctttgatcttcttcaatatgtgaatttgggctcacagaatcaaagcctatgcttggtttaatgcttgcaatctgagctcttgaacaaataaaattaactattgtagtgtgaaaaaaaaaaaa

SEQ ID NO: 4 - DNA, 1657 bp, Homo sapiens
  CDS (105)..(1385)
atttggccctcgaggccaagaattcggcacgaggcgggcctggagtctgagccggcgccgctcagtgtgaggtggtttctgcgggtgaggctggcgcccgtaccatgagcgaggcggacgggctgcgacagcgccggcccctgcggccgcaggtcgtcacagacgatgatggccaggccccggaggctaaggacggcagctcctttagcggcagagttttccgagtgaccttcttgatgctggctgtttctctcaccgttcccctgcttggagccatgatgctgctggaatctcctatagatccacagcctctcagacagatctctggaattgcattattttgcagcttcaaagaacccccgctcttgcttggtgttctgcatccaaatacgaagctgcgacaggcagaaaggctgtttgaaaatcaacttgttggaccggagtccatagcacatattggggatgtgatgtttactgggacagcagatggccgggtcgtaaaacttgaaaatggtgaaatagagaccattgcccggtttggttcgggcccttgcaaaacccgagatgatgagcctgtgtgtgggagacccctgggtatccgtgcagggcccaatgggactctctttgtggccgatgcatacaagggactatttgaagtaaatccctggaaacgtgaagtgaaactgctgctgtcctccgagacacccattgaggggaagaacatgtcctttgtgaatgatcttacagtcactcaggatgggaggaagatttatttcaccgattctagcagcaaatggcaaagacgagactacctgcttctggtgatggagggcacagatgacgggcgcctgctggagtatgatactgtgaccagggaagtaaaagttttattggaccagctgcggttcccgaatggagtccagctgtctcctgcagaagactttgtcctggtggcagaaacaaccatggccaggatacgaagagtctacgtttctggcctgatgaagggcggggctgatctgtttgtggagaacatgcctggatttccagacaacatccggcccagcagctctggggggtactgggtgggcatgtcgaccatccgccctaaccctgggttttccatgctggatttcttatctgagagaccctggattaaaaggatgatttttaagctctttagtcaagagacggtgatgaagtttgtgccgcggtacagcctcgtcctagaactcagcgacagcggtgccttccggagaagcctgcatgatcccgatgggctggtggccacctacatcagcgaggtgcacgaacacgatgggcacctgtacctgggctctttcaggtcccccttcctctgcagactcagcctccaggctgtttagccctcccagatagctgcccctgccacgcaggccaggagtcttcacactcaggcaccaggcctggtccaggaggagctgtggacacagtcgtggttcaagtgtccacatgcacctgttagtccctgagaggtggtgggaatggctgcttcattcctcgaggatgcccgggccccacctgggcttgtctttctgtttagagggaagtgtaacatatctgccatgaggaacataaattcatgtaaagccattttctcttaaacaaaaaaaaaaaa

SEQ ID NO: 5 - DNA, 1476 bp, Homo sapiens
  CDS (248)..(1177)
gctgctggagctgcagcccgaccgcgagcgtgccaagcggcttcagcagctagcggacgtggcggcggcccccctcaggacaccaccagattcccctcttcccgcggcctcgccatggcgacccacggacagacttgcgcgcgtcgatcggatcaatcacttttctagaggaagtagcagtccctcttgtgagagcgcaaggtcattacttgtgctcctaagggcgtggacgtgctttgtggaatgaatgagctggtgtaatgagctcagattgcctgcccttaagcagcacagcattggccgaggacttgagagtcacattacaatgtgtattcctccatcatatgctgaccttggcaaagctgccagagatattttcaacaaaggatttggttttgggttggtgaaactggatgtgaaaacaaagtcttgcagtggcgtggaattttcaacgtccggttcatctaatacagacactggtaaagttactgggaccttggagaccaaatacaagtggtgtgagtatggtctgactttcacagaaaagtggaacactgataacactctgggaacagaaatcgcaattgaagaccagatttgtcaaggtttgaaactgacatttgatactaccttctcaccaaacacaggaaagaaaagtggtaaaatcaagtcttcttacaagagggagtgtataaaccttggttgtgatgttgactttgattttgctggacctgcaatccatggttcagctgtctttggttatgagggctggcttgctggctaccagatgacctttgacagtgccaaatcaaagctgacaaggaataactttgcagtgggctacaggactggggacttccagctacacactaatgtcaatgatgggacagaatttggaggatcaatttatcagaaagtttgtgaagatcttgacacttcagtaaaccttgcttggacatcaggtaccaactgcactcgttttggcattgcagctaaatatcagttggatcccactgcttccatttctgcaaaagtcaacaactctagcttaattggagtaggctatactcagactctgaggcctggtgtgaagcttacactctctgctctggtagatgggaagagcattaatgctggaggccacaaggttgggctcgccctggagttggaggcttaatccagctgaaagaaacctttgggaatggatatcagaagatttggccttaatatatttccattgtgaccagcagcaggcttttttccccccagaagatgatcaaaacaaaggatgatctcaacaagagctgtattttaagtatttagacagttctttgttagctggtttctagttggttatctagttaccaatgctgcagtcctgcagtcacctatacattatttaaatgtatttaactgttaaatgcgctacccaccaataatgaaatagacctttatgaaaactgtgaaaaaaaaaaa

SEQ ID NO: 6 - DNA, 854 bp, Homo sapiens
  CDS (223)..(633)
caatgaacgcccgtcggcaatggaccgcaattgccgggtcgacccacgcgtccgccggaatcccagctccacttaccaggccgcggctaccccgccgtcccccccgactcccgccaccccgctctctcaggctcttcaggatccaagtccgtaggccctttaaggggtctagttgccgtttgcgaggccctgggactttggtcccagacagcggggatccggatggcttccgtgcggatccgagaggccaaggagggagactgtggagatatcctgaggctgattcgggagctagccgaattcgaaaaactctcggatcaggtgaagatcagtgaagaagccctgagagcagatggctttggagacaatcctttctatcactgtttggtagcagagattcttccagcgcccgggaagctactgggtcaagggattggttccaaaataatcaaaaaggtggctgaggtggccttggataagggctgctcccaattccgcctggccgtcctggactggaaccagagggccatggacttgtacaaggccctaggagcccaagatctgacggaagctgagggctggcactttttttgctttcaaggagaggcaacgagaaagttggcaggaaagtgacgccatccctaggaggatttctgtcttgagtttttccttccccatcagctgaagcacttttcagagactacgtccacagacactgatgctgaggcctccctggaggaaggagggttaggggtgcctatcctcaagtattggaagagcagaattgagggagagaccttttttccttgttgagggtgaaaaataaataagaattacatgtcaaaaaaaaaaaa

SEQ ID NO: 7 - DNA, 612 bp, Homo sapiens
  CDS (182)..(490)
cagccagtgaattgaatttaggtgacactatagaagagctatgacgtcgcatgcacgcgtacgtaagcttggatcctctagagcggccgcctactactactactaaattcgcggccggtcgaccttcgccaggctctctgctgactcaagttcttcagttcacgatcttctagttgcagcgatgagtgcacgagtgagatcaagatccagaggaagaggagatggtcaggaggctcccgatgtggttgcattcgtggctcccggtgaatctcagcaagaggaaccaccaactgacaatcaggatattgaacctggacaagagagagaaggaacacctccgatcgaagaacgtaaagtagaaggtgattgccaggaaatggatctggaaaagactcggagtgagcgtggagatggctctgatgtaaaagagaagactccacctaatcctaagcatgctaagactaaagaagcaggagatgggcagccataagttaaaaagaagacaagctgaagctacacacatggctgatgtcacattgaaaatgtgactgaaaatttgaaaattctctcaataaagtttgagttttctctgaagaaaaaaaaaaaaaaaaa

SEQ ID NO: 8 - DNA, 4440 bp, Homo sapiens
  CDS (650)..(4138)
tcaacatatgaaaaatcaatgtaatatttcatattaacagttggaagactcacaattcatagtttcagaatttacaacacaaacctacaggaataaagacaatgtagtattagaataaggtcagatatatagatcaatggacagaattgacagtccagaaatacacccatacgattacggtcacctgatttttgactaaggttccaaaacaattcactaggggaaagaatagtcttgtcaaaaaatggtgctcagacaagtggatagccataagcacagaatgagtttggacccctatctcaaatctcaaatacaaacattaactccgaattaatcaaatgcctaaatttaagagctaaaattttaaagctcttagaagaaaacataggtacacatctttgtgactttgaattaggtcacggtttccttgacatgacacttaaaagtacaagcaacaaaagaaaaaaatagataaaatgaacttcagcaaaattagaatgtttatgcttcagaaaacactgtgaagaaagtgatcagacaactcacagaatgggaaaaatatttgtgaatcatatctcttaataagggtccagcagaaaagggcaaaggtggaaatggaggaggaaaacctccttctggtccaaaccgaatgaatggtcatcaccaacagaatggagtggaaaacatgatgttgtttgaagttgttaaaatgggcaagagtgctatgcagtcggtggtagatgattggatagaatcatacaagcatgaccgagatatagcacttcttgaccttatcaacttttttattcagtgttcaggctgtaaaggagttgtcacagcagaaatgtttagacatatgcagaactctgagataattcgaaaaatgactgaagaattcgatgaggatagtggagattatccacttaccatggctggtcctcagtggaagaagttcaaatccagtttttgtgaattcattggcgtgttagtacggcaatgtcaatatagtatcatatatgatgagtatatgatggatacagtcatttcacttcttacaggattgtctgactcacaagtcagagcatttcgacatacaagcaccctggcagctatgaagttgatgacagctttggtgaatgtggcactaaatcttagcattaatatggataatacacaaagacaatatgaagcagaacgaaataaaatgattgggaaacgagccaatgagaggctagaactcctgctacaaaagcggaaagagcttcaggaaaatcaagatgaaatagaaaatatgatgaatgcaatatttaaaggagtgtttgtacatagataccgtgatgcgatacgtgaaattcgagctatttgcattgaagagattggcatttggatgaagatgtatagtgatgcctttcttaatgacagttatttaaaatatgttggttggactatgcatgataagcaaggtgaagtaagactcaaatgtcttactgctctacaagggctttattataacaaagagcttaattccaaactggaactttttaccagtcggttcaaggatagaattgtgtctatgacccttgacaaagaatatgatgttgcagtacaagcaataaaattactcactcttgttttacagagtagtgaagaagttctcactgcagaagattgtgaaaatgtctatcatctggtttattcagctcaccggccagtagcagtagcagctggagaatttctctacaaaaagctcttcagtcgtagagatccagaggaggatggaatgatgaaaagaagaggaagacaaggtccaaatgccaaccttgttaagacattggtttttttctttctagaaagtgagttacatgagcatgcagcataccttgtggatagcatgtgggactgtgctactgagctgctgaaagactgggaatgtatgaatagcttgttactggaagagccacttagtggagaggaagcactaacagataggcaagagagtgctctgattgaaataatgctttgtaccattagacaagcggctgaatgtcatcctcccgtgggaagagggacaggaaaaagggtgcttacagcaaaggagaagaagacacagttggatgataggacaaaaatcactgagctttttgccgtggcccttcctcagttattagcaaaatactctgtagatgcagaaaaggtgactaacttgttgcagttgcctcagtactttgatttggaaatatataccactggacgattagaaaagcatttggatgccttattgcgacagatccggaatattgtagagaagcacacagatacagatgttttggaagcatgttctaaaacttaccatgcactctgtaatgaagagttcacaatcttcaacagagtagatatttcaagaagtcaactgatagatgaattggcagataaatttaaccggcttcttgaagattttctgcaagagggtgaagaacctgatgaagatgatgcatatcaggtattgtcaacattgaagaggatcactgcttttcataatgcccatgacctttcaaagagggatttatttgcttgtaattacaaactcttgaaaactggaatcgaaaatggagacatgcctgagcagattgttattcacgcactgcagtgtactcactatgtaatcctttggcaacttgctaagataactgaaagcagctctacaaaggaggacttgctgcgtttaaagaaacaaatgagagtattttgtcagatatgtcaacattacctgaccaacgtgaatactactgttaaggaacaggccttcactattctgtgtgatattttgatgatcttcagccatcagattatgtcaggagggcgtgacatgttagagccattagtgtatacccctgattcttcattgcagtctgagttgctcagctttattttggatcatgtcttcattgaacaggatgatgataataatagtgcagatggtcagcaagaggatgaagccagtaaaattgaagctctgcacaagagaagaaatttacttgcagcattttgtaagctaattgtatatactgtggtggagatgaatacagctgcagatatcttcaaacagtatatgaagtattataatgactatggagatatcatcaaagaaacaatgagtaaaacaaggcagatagacaaaattcagtgtgctaagacccttattctcagtctgcaacagctttttaatgaaatgatacaagaaaatggctataattttgatagatcatcctctacatttagtggcataaaagaacttgctcgacgttttgctttaacttttggacttgatcagttgaaaacaagagaagccattgccatgctacacaaagatggcatagaatttgcttttaaagagcctaatccgcaaggggagagccatccacctttaaatttggcatttcttgatattctgagtgaattttcttctaaactacttcgacaagacaaaagaacagtgtatgtttacttggaaaagttcatgacctttcagatgtcactccgaagagaggatgtgtggcttccactgatgtcttaccgaaattctttgctagctggtggtgatgatgacaccatgtcagtcattagtggaatcagcagccgggggtcaacagtacggagtaaaaaatcaaaaccatctacaggaaaacggaaagtggttgagggcatgcagctttcactcactgaagaaagtagtagtagtgacagtatgtggttaagcagagaacaaacactgcacacccctgttatgatgcagacaccacaactcacctccactattatgagagagcccaaaagattacggcctgaggatagcttcatgagtgtttatccaatgcagactgaacatcatcaaacacctcttgattataatcggcgtggcacaagcctaatggaagatgatgaagagccaattgtggaagatgttatgatgtcctcagaagggaggattgaggatcttaatgagggaatggattttgacaccatggatatagatttgccaccatcaaagaacagacgagagagaacagaactgaagcctgatttctttgatccagcttcaattatggatgaatcagttcttggagtgtcaatgttttaataccagtacacaattaaatctgtggtgaagtcattttctaagtggaagaggaaattttaaagtgtggtagatacagtgaaattctgtacagatttttctctaaggagaatatgacatgcttatgcttaccaagatcaagtgcattgaggggcagttttgtttgcctgaataaacgtaaaggacaagtaaacaatttgatgataagctacagtttttcttagaaagtaaatattttatttatgcgctgttagttggcttttgaatcgattatttcatgcttttttttaaaaaaaaaaaaaaaa

SEQ ID NO: 9 - DNA, 596 bp, Homo sapiens
  CDS (22)..(423)
cgctggtcttcgctggacaccatgaatcacactgtccaaaccttcttctctcctgtcaacagtggccagccccccaactatgagatgctcaaggaggagcacgaggtggctgtgctgggggcgccccacaaccctgctcccccgacgtccaccgtgatccacatccgcagcgagacctccgtgcccgaccatgtcgtctggtccctgttcaacaccctcttcatgaacccctgctgcctgggcttcatagcattcgcctactccgtgaagtctagggacaggaagatggttggcgacgtgaccggggcccaggcctatgcctccaccgccaagtgcctgaacatctgggccctgattctgggcatcctcatgaccattctgctcatcgtcatcccagtgctgatcttccaggcctatggatagatcaggaggcatcactgaggccaggagctctgcccatgacctgtatcccacgtactccaacttccattcctcgccctgcccccggagccgagtcctgtatcagccctttatcctcacacgcttttctacaatggcattcaataaagtgcacgtgtttctggtcgacgcggccg

SEQ ID NO: 10 - DNA, 3227 bp, Homo sapiens
  CDS (1672)..(2805)
tgttggaagttctggccagggcaatcaggcaggagaaggaaataaagggtattcaattaggaaaagaggaagtcaaattgtccctgtttgcagatgacatgattgtatatctagaaaaccccattgtctcagcccaaaatctccttaagctgataagcaacttcagcaaagtctcaggatacaaaatcaatgtgcaaaaatcacagtcattcttatacaccaataacagacaaacagggagccaaatcatgagtgaactcccattcacaattgcttcaaagagaataaaatacctaggaatccaacttacaagggatgtgaaggacctcttcaaggagaactacaaaccactgctcaatgaaataaaagaggatacaaacaaatggaagaacattccatgctcatggataggaagaatcaatatcatgaaaatggccatactacccaaggtaatttatagattcaatgccacccccatcaagctaccaacgactttcttcacagaactggaaaaaactactttaaagttcatatggaatcaaaaaagagcccgcatcgccaagtcaatcctaagccaaaagaacaaagcaagaataaagctggaggcatcactattcaaactatactacaaggctacagtaaccgaaacagcatggtactggtaccaaaacagagatatagatcaatggaacagaacagagccctcagaaataatgccgcatatctacaactatctgatctttgacaaacctgagaaaaacaagcaatggggaaaggattccctatttaataaatggtgctgggaaaactggctagccatatgtagaaagctgaaactggatcccttccttacaccttatacaaaaatcaattcaagatggattaaagacttaaatgttagacctaaagccataaaagtcctagaagaaaacctaggcaataccattcaggacataggcatgggcaaggacttcatgactaaaacaccaaaagcaatggcaacaaaagccaaaattgacaaatgggatataattaacctaaagagcttctgcacagcagaagaaactaccatcagagtgaacaggcaacctacagaatgggagaaaaattttgcaatctacccatctgacaaaggactaatatccagattctacaaagaactcaaacaaatttacaagaaaaaaaaaaccatcaaaaagtgggcaaaggatatgaacagacacttctcaaacggagacatttatgcagccaacagacacatgaaaaaatgctcatcatcactggtcatcagagaaatgcaaatcaaaatcacaatgagataccatctcataccagttagaatggcaatcattaaaaagtcaggaaacaacaggtgttggagaggatgtggagaaataggaacacttttacactgttggtgggactgtaaactagttcaaccattgtggaagacagtgtggcgattcctcaaggatctagaactagaaataccatttgactcagcaatcccattactgggtatatacccaaaagattataaatcatgctgctataaagacacatgtacacagctacgcggcggcggcggagcgcaggcctcgtgccgttacggccatcacggcggccgcagtggcgtcctggagccctcctcagtgctgaagctgctgaaagatggcagaagaagtggtggtagtagccaaatttgattatgtggcccaacaagaacaagagttggacatcaagaagaatgagagattatggcttctggatgattctaagtcctggtggcgagttcgaaattccatgaataaaacaggttttgtgccttctaactatgtggaaaggaaaaacagtgctcggaaagcatctattgtgaaaaacctaaaggataccttaggcattggaaaagtgaaaagaaaacctagtgtgccagattctgcatctcctgctgatgatagttttgttgacccaggggaacgtctctatgacctcaacatgcccgcttatgtgaaatttaactacatggctgagagagaggatgaattatcattgataaaggggacaaaggtgatcgtcatggagaaatgcagtgatgggtggtggcgtggtagctacaatggacaagttggatggttcccttcaaactatgtaactgaagaaggtgacagtcctttgggtgaccatgtgggttctctgtcagagaaattagcagcagtcgtcaataacctaaatactgggcaagtgttgcatgtggtacaggctctttacccattcagctcatctaatgatgaagaacttaatttcgagaaaggagatgtaatggatgttattgaaaaacctgaaaatgacccagagtggtggaaatgcaggaagatcaatggtatggttggtctagtaccaaaaaactatgttaccgttatgcagaataatccattaacttcaggtttggaaccatcacctccacagtgtgattacattaggccttcactcactggaaagtttgctggcaatccttggtattatggcaaagtcaccaggcatcaagcagaaatggcattaaatgaaagaggacatgaaggggatttcctcattcgtgatagtgaatcttcgccaaatgatttctcagtatcactaaaagcacaagggaaaaacaagcattttaaagtccaactaaaagagactgtctactgcattgggcagcgtaaattcagcaccatggaagaacttgtagaacattacaaaaaggcaccaatttttacaagtgaacaaggagaaaaattatatcttgtcaagcatttatcatgatactgctgaccagaagtgactgctgtgtagctgtaatttgtcatgtaattgaattgaagactgagaaaatgttgggtccagtcgtgcttgattggaaattgttgtttctaaatctatatgagaattgacaataagtatttttattataactcagcccatacatatatactatgtatgcagtgcatctgcatagaacagttccttatccttggccttctgttttattgtttttttctttgctgttttccctttgcttctaatattacagttttgtattttgtaaacaaaaatcaaataatgcatatcagaatctttatatggaagaaatcctttattgcctttcctttgtttccttgtaaaggcaccctgttctgttatggtttttcattatataaaattattatatctataaaaaaaaaaaa

SEQ ID NO: 11 - DNA, 921 bp, Homo sapiens
  CDS (102)..(869)
gagctatgacgtcgcatgcacgcgtacgtaagcttggatcctctagagcggccgcctactactactaaattcgcggccggtacgacggctgcggcgggaagatggcggagctgcgcgtgctcgtagctgtcaagagggtcatcgactacgccgtgaagatccgagtgaagcctgacaggaccggtgtggtcacggatggtgtgaagcactccatgaaccccttctgtgagatcgcggtggaggaggctgtgcggctcaaggagaagaagctggtgaaggaggtcatcgccgtcagctgtgggcctgcacagtgccaggagacgattcgtaccgccctggccatgggtgcagaccgaggtatccacgtggaggtgcccccagcagaagcagaacgcttgggtcccctgcaggtggctcgggtcctggccaagctggcagagaaggagaaggtggacctggtgctgctgggcaaacaggccatcgatgatgactgtaaccagacagggcagatgacagctggatttcttgactggccacagggcacattcgcctcccaggtgatgctggagggggacaagttgaaagtggagcgggagatcgatgggggcctggagaccctgcgcctgaagctgccagctgtggtgacagctgacctgaggctcaacgagccccgctacgccacgctgcccaacatcatgaaagccaagaagaagaagatcgaggtgatcaagcctggggacctgggtgtggacctgacctccaagctctctgtgatcagtgtggaggacccgccccagcgcacggccggcgtcaaggtggagaccactgaggacctggtggccaagctgaaggagattgggcggatttgagcccctcccagagatggcaataaaactgactctcaacatcaaaaaaaaaaaa

SEQ ID NO: 12 - DNA, 2094 bp, Homo sapiens
  CDS (435)..(1550)
attgaaacccttatagaataccgatgaccaagctgcctagcgtttaaacttaagcttggtaccgagctcggatccactagtccagtgtggtggaattcgcagatagtccctgggccggggctcgcgctggccggctgcagcgcgcagggtgccaagccctcccctacgaagtctgttttgtctcaggctgggctgagtcacatagaatagatagatagttgatttagcacatgtcctccagatcatattatccgcctacaaatatagcctgttagcgcacaggcacgggaggcttcttccggctcggccgtgctgctcagcgggtgtaaacagcctctgcggtgtaaacagcctctgcggtgtaaacagccgcggcgggcaggccaggactgtcagtgcccgcccctcggggcaggtaatttcatgctcccaaaatgggacataaagtggttgtcttcgacatttctgtcatcagagccttgtgggaaactcgtgtcaagaagcacaaagcttggcagaagaaggaggtggaaaggcttgagaagagcgccttggagaagataaaggaggagtggaactttgtggccgaatgcaggaggaagggcatcccccaggctgtatactgcaagaatggcttcatagacaccagcgtgcggcttctggacaagattgaaaggaacactctcacaaggcagagttcacttcccaaggacagaggcaaacggagcagtgcgtttgtgtttgaactttctggggagcactggacggagctcccagattcattgaaggagcagacacacctgagagaatggtacataagcaataccttgattcaaatcattcctacatatattcagttatttcaagcgatgagaattctggatctgccaaaaaaccaaatctcacatcttccagcagaaatcggttgtttgaagaacctgaaagaactcaatgtgggtttcaactatctgaagagcattcctccagaattgggagattgtgaaaatctagagagactggattgttctggaaatctagaattaatggagctgccctttgaattaagtaatttgaagcaagttacatttgtagatatctcagcaaacaagttttccagtgtcccaatctgtgtcctgcggatgtcgaatttgcagtggttggatatcagcagcaataacctgaccgacctgccgcaagatatagacaggctagaggagctgcagagctttctcttgtataaaaacaagttgacctaccttccctattccatgctgaacctgaagaagctcactctgttagtcgtcagtggggaccatttggtggagctcccaactgccctttgtgactcatccacacctttaaaatttgtaagccttatggacaatcctattgataatgcccaatgtgaagatggcaatgaaataatggaaagtgaacgggatcgccaacattttgataaagaagttatgaaagcctatattgaagaccttaaagaaagagaatctgttcccagctataccaccaaagtgtcttttagccttcaactttgatatccatcagaagactgcaaatctcactattctctggagctatatataaatctttgttatgatcatgtcatataggaagaatggcttgtgcttaaggacaaagtctagaaaccactatcatagttgctaaaaaaaatggttttcaaatgtcaaatacatgagtatctccctccatggactggagaattgaaaaattggtttgtatattgatatttccaggttcatttgcatatacttttttccaaataatgcacatttaatatgttttaaaatgtcttatttttaagaattataactaaaagaccaaatactgaagttaagtgcattgttttcaggaatcaaaagataaaggggccgggtgtggtggctcacacctgtaatcccagcactttgggaggccgaagtgggtggatcacctgaggtccggagttcgaggctggtttggccagcatggcgaaaccccatctctactaaaaatacaaaaaattagctgggcatggtggcagttgcctgtaatcctagctactcaggaggctgaggcagg

SEQ ID NO: 13 - DNA, 650 bp, Homo sapiens
  CDS (216)..(566)
atagaattcgatagcctgcggtaccggtccggaattcccgggtcgacccacgcgtccgcccacgcgtccggcctggttctaggaataatgggggaagtatgtaggagttgaagattagtccgccgtagtcggtgtactcgtaggttcagtaccattggtggccaattgatttgatggtaagggagggatcgttgacctcgtctgttatgtaaaggatgcgtagggatgatagcgctcacgcaagcatggttaacgtccctaaaacccgccggactttctgtaagaagtgtggcaagcaccaaccccataaagtgacacagtacaagaagggcaaggattctctgtacgcccagggaaagcggcgttatgacaggaagcagagtggctatggtgggcaaactaagccgattttccggaaaaaggctaaaactacaaagaagattgtgctaaggcttgagtgcgttgagcccaactgcagatctaagagaatgctggctattaaaagatgcaagcattttgaactgggaggagataagaagagaaagggccaagtgatccagttctaagtgtcatcttttattatgaagacaataaaatcttgagtttatggtcgacgcggccgcgaattcggatcctcgagagatctcttt

SEQ ID NO: 14 - DNA, 1383 bp, Homo sapiens
  CDS (1)..(1161)
atggagctgaaagccaaggctcgagaactacgtgaagaatgcagaagcctcaggagccgatgcgatcaactggaagaaagggtatcagtgatggaaaatgaaatgaatgaaatgaagcgagaagggaagtttagagaaaaaagaataaaaagaaacgaacaaagccttcaagaaatatgggactatgtgaaaagaccaaatctacatctgattggtgtacctgaaagtgacggggagaatggaaccaagttggaaaacactctgcaggatattatccaggagaacttccccaatctagcaaggcaggccaacattcagattcaggaaatacagagaacgccacaaagatactcctcgagaagagcaactccaagacacataattgtcagaatcaccaaagtggaaatgaaggaaaaaatgttaagggcagccagagagaaaggtcgggttccccacaaagggaagcccatcagactaacagcggatctctcgtcagaaactctacaagccagaagagagtgggggccaatattcaacattcttaaaagaattttcagctttccacagcgcgggggaacgggaggccgcaggatggtcaagctgacggcggagctgatcgagcaggcggcgcagtacaccagcgcggtgcgcgaccgggagctggacctccgggggtataaaattcccgtcattgaaaatctaggtgctacgttagaccagtttgatgctattgatttttctgacaatgagatcaggaaactggatggttttcctttgttgagaagactgaaaacgttgttagtgaacaaaacagaatatgccagtactggatttccagaaagtgaaactaaagagcgtcaggaagcagagaaaatgttcaagggcaaacggggtgcacagcttgcaaaggatattgccaggagaagcaaaacttttaatccaggtgctggtttgccaactgacaaaaagaaaggtgggccatctccaggggatgtagaagcaatcaagaatgccatagcaaatgcttcaactctggctgaagtggagaggctgaaggggttgctgcagtctggtcagatccctggcagagaacgcagatcagggcccactgatgatggtgaagaagagatggaagaagacacagtcacaaacgggtcctgagcagtgaggcagatgtataataataggccctcttggaacaagtcttgcttttcgaacatggtataatagccttgtttgtgttagcaaagtggaatctatcagcattgttgaaatgcttaagactgctgctgataattttgtaatataagttttgaaatctaaatgtcaattttctacaaattataaaaataaactccactcactatgctaccaaaaaaaaaa

SEQ ID NO: 15 - DNA, 5933 bp, Homo sapiens
  CDS (1)..(3720)
atggcggccgccttcggccacggcggaggactcgctttcccaggggcccccgcggtcgcaggggcaacgagcccggccggccctcgcgagcggaggcggggccggggccggaagtcacgtgctgtgacagtagctggggtgaggccgtcgtcgccgcacgggctggttggggctgtgtctgtgggaggcgccggggtgatggcggtggagactctgtccccggactgggagtttgaccgcgttgacgacggctcgcagaaaattcatgccgaagtccaacttaagaattatgggaaatttcttgaggagtatacctctcaactgagaagaattgaggacgctctggatgactcaattggagatgtttgggatttcaatcttgatcctatagcattaaagcttttgccttatgaacagtcctctcttttggaactcataaagactgaaaacaaggtcttaaacaaagtcatcactgtttatgctgcactttgttgtgaaatcaagaaattaaaatatgaggctgaaactaaattttacaatggtctcttgttttatggagaaggagctacagatgccagcatggtggaaggtgattgccaaattcaaatggggagatttatttcattcttacaggaactgtcttgctttgttacgaggtgctatgaagtggtgatgaacgtagtccaccagttggctgccctctatatcagtaacaagattgcacccaaaattatagagacaactggagttcattttcagactatgtatgagcacttgggagaactgctaacagttttgctcaccctggatgaaattattgataatcatatcacactgaaagaccactggactatgtacaaaaggttactgaaatctgtccatcacaatccttcaaaatttggaattcaggaagaaaaattaaagccatttgaaaagttcttgctgaagctagaagggcaattactggatggaatgatattccaggcctgtatagaacaacaatttgattctctcaatggaggagtatctgtgtcaaaaaatagtacttttgctgaggaatttgcacatagtattcggtcaatttttgcaaatgtagaagccaaacttggagaaccttctgaaattgaccagagagacaagtatgttggaatttgtggactctttgtattgcactttcagatttttcgaactattgataaaaagttttataagtctttattggacatttgtaagaaggtaccagccatcactctaactgctaatattatttggtttcctgataattttctgatccagaaaataccagcagctgccaaactgctagacagaaaaagtcttcaagccattaaaatacacagggatacttttctacaacagaaagctcaatcacttaccaaagatgtacagtcttactacgtctttgtgagctcatggatgatgaaaatggaatctattttgtctaaagagcagagaatggataaatttgctgaagatctcaccaatagatgtaatgtttttatacagggcttcttgtatgcatatagtattagtaccattattaaaaccacaatgaatctctacatgtccatgcaaaagccaatgaccaaaacctcagttaaggcattgtgcaggcttgttgaacttctcaaggcaatagagcatatgttctacaggagaagcatggttgtggctgattcagtttcacatataacacagcaccttcaacatcaggctcttcattctatttctgtggccaagaaaagagtgatttctgacaaaaaatacagcgaacagcgtcttgatgtgctctctgctctagttttggctgaaaacactctaaatggaccaagcacaaagcaacggcgacttattgtttctttggcactaagtgttggcacacaaatgaaaacatttaaagatgaagaactctttccacttcaagtagtcatgaaaaaactggatcttattagtgaacttagagaacgagtccaaacacaatgtgactgttgttttttatactggcatcgagctgtcttcccaatttatttagatgatgtatatgaaaatgctgttgatgcagccagattacattacatgttcagtgctttgcgcgactgtgtacctgctatgatgcatgcaaggcatttagagtcctatgagatacttctggattgctatgacaaggaaattatggaaattttaaatgagcatttgctggacaaattatgcaaagaaatagagaaagatctgcgactttctgtgcatactcatttaaagctggatgaccgaaaccctttcaaagttggcatgaaagacctggctctttttttctctctgaatccaattcggtttttcaatcgtttcattgacattcgggcttacgtaactcactacctagacaagactttctacaatctaacaactgtagcccttcatgactgggccacttatagtgagatgagaaacttagctactcagcgttatggactggttatgacagaggcacatcttcccagtcagactttggaacagggccttgatgttttagaaattatgagaaacattcatatatttgtgtcccgatacctctataatctcaacaatcagatttttattgaacgaacaagcaataacaagcatttgaatactattaatattcggcatattgctaattcaattcgaacacatggcacgggaattatgaatacaactgttaatttcacctaccagtttttgaaaaagaagttctatatatttagccaatttatgtatgatgaacacatcaaatccagattgattaaagatattcgatttttcagggaaattaaggaccaaaatgatcataagtatccttttgatagagcagaaaaattcaatcgaggcatcagaaaacttggaataacacctgagggacagagctaccttgatcaattcaggcaactcatcagccagattggtaatgctatgggctatgtacgaatgataagatctggtggtcttcattgtagcagcaatgccattagatttgttcctgatcttgaagatattgtaaattttgaagaactagtaaaagaagaaggtcttgcagaagaaacattaaaagcagcaaggcatttggattcagtcctcagtgatcacacacgaaattctgccgaaggcacagaatatttcaaaatgcttgtagacgtttttgctccagaatttcgaaggccaaagaatatacatctccgaaatttctatataattgttccccctctgaccctcaactttgtagagcattccattagttgcaaggaaaaattaaataaaaaaaataaaattggagctgcctttactgatgatggctttgccatgggtgtggcttacattctaaagcttttggatcagtatcgggagtttgattcacttcactggttccagtctgttagagagaaatacctgaaggagataagagcagttgctaagcaacagaatgtacagtcagccagtcaagatgaaaaactcttacaaaccatgaatctcactcagaagcgactggatgtctatctacaggaatttgaattgctgtatttctcactgagcagtgcaagaattttcttcagagcagacaagactgcggctgaagaaaaccaagaaaagaaagagaaggaagaagaaactaaaacaagcaatggagacctgtctgacagcactgtgtctgctgatcctgttgtgaaatgatacggatggtattcactgcacatatgatgaaatcatcagaattgttaaaacttttgccagtggaatggataaactattgatgaattgtttcctgggtcacatctctggaaaatagatgttacagttcttaaaggcagtgctttaaagtgaagttcattctgtttccaaaggctctactttcaaaggttaagaatgagattttaaaattggatttttgcctggacttgagggtacaagatgtttctatttgaagtgaagttataaaagggcaaatccagattcataaactatcacctcggatttcttgtaatctacatgtttgtaatttgtatttgcatagatctttgatctatagttatttcaagtcatgggaaattcaatgcatatagtatatacagccagtaaatacatgcttaacaaaaggaatgagcctgaagttcataaagaatacatatcaatattcttataaaaggaatatatgaagatggctttgatactagaggtgaggcacaagtgttttatgtactctcagtgtacagtataactgatgatccttctttcattgttaatttcatgtgactcacaagagctgctgatgtctttgatgagacattttataactagtttacattgctttgagaacatttaacctccaacagctgctttaaatttaagatttacttaatactcagaaaattcagataaagccatagagtcctgtttgaagcttcacttctattttggttgaaggcatgatgtatgatgtcagaaaaaaaattgaatgaattatttctacatccaaactcaggtttcttctacattagattgaattgaaattttggtgatggtttgggtagactttttttttatatcaagtataatttaaaacatcagattaaataattacactgttcaggcttttaaaaaaataccactgtgagaataaagcgctagtaagatacatcacttactgattttaaaaatacagaaagattttgagtaaattttgtgcccagcaagctgttagttttatttttgtaaaggtatgtaagttattaaatggttaatcatggccttttaaaaataaaataaagtgatacctttacaatgaagacaaaagtttaaaactttctaatacaaacaccattttgggaaatgcttgatttttttctattgcatttgtctgctaaacatttctttggataaatcctgcaaatacttctaacattattctttgattccagcttttagaatgggtgtacaatgccctgtttgtacttactggttagggtcagggtaacttgccagcccaagataaatactttaatcgttaaaagtcagaagagacagaatatgtaggaaatgttttttgtttattatgtaaacatggcttacagaattatgaacagtggatagattaaaggcatttaatatttgtaattcataataactgtagaaatggccctaaagcatgctgcataattaataatttatattttcattattataagtgtttatattaatgatcttgcatttgattatatcaaattcgtcatttcatagcaacagtattgttttctctgtttttcttctctaacttctctgaaatcatctcctattaagggatagaaattgttactagaagagaatcacatgttctgtgttcattatccctacacatgtaaattaattattttatcaatactagatagagttcacatgctgactccctggatacctacagttgagaagaaaatgacagacaattatttttcctttaggtcaaaataatgtcactgctatctggataaattataagttcatatatttgaaataagatcctggaaacgaatttaaatggtgtcaaactgcagagcaacagggcttcagtatattcacatctaataggttaatatgtacatttggatgatgatttttcttgataacattaacattaattttattttttcagacatactgtaatttaaaaattaatgtgagcgtttgttttaagttcacagaaaacttaataattcaaattctcaggaattaaggactcaccataacattgtcagttccaatgaaattttgtaaaagatggcaagtttgttacctcacttgagtggggttttccttttcccccaattctaagagaatataatgtgtatactaaaacattaataaacataattttgaaaatttcaaaaaaaaaa

SEQ ID NO: 16 - DNA, 817 bp, Homo sapiens
  CDS (291)..(674)
cgtcacaacagagaaatttataagctccaccgaccagggcgtcgtatccccaccctctgcctaagaagtccaaggctaaagaataagccttagccctccgcgtgcccgcgggtctgtctcttgcttcaacagtgtttggacggaacagatccggggactctcttccagcctccgaccgccctccgatttcctctccgcttgcaacctccgggaccatcttctcggccatctcctgcttctgggacctgccagcaccgtttttgtggttagctccttcttgccaaccaaccatgagctcccagattcgtcagaattattccaccgacgtggaggcagccgtcaacagcctggtcaatttgtacctgcaggcctcctacacctacctctctctgggcttctatttcgaccgcgatgatgtggctctggaaggcgtgagccacttcttccgcgaattggccgaggagaagcgcgagggctacgagcgtctcctgaagatgcaaaaccagcgtggcggccgcgctctcttccaggacatcaagaagccagctgaagatgagtggggtaaaaccccagacgccatgaaagctgccatggccctggagaaaaagctgaaccaggcccttttggatcttcatgccatgggttctgcccgcacggacccccatctcatgtgacttcctggagcctcacttcatagatgaggaagtgaagcttatcaagaagatgggggaccacctgtccatcctacacaggctgggtggcgcgcaggctgggctgggcgagtatctctcagtaaggctcgctctcaagcacagat

SEQ ID NO: 17 - DNA, 1402 bp, Homo sapiens
  CDS (299)..(1225)
accggtccggaattcccgggtcgacccacgcgtccggctacgcttatttggagactagaggagtgacaatccactttaataatccagcttcagctcagctgagaacttcccctctcaggtgcaaagggatggcagagaagtctttccaagagggctcaatccactaagagattatggcttagagaagggaacagctcaaagaagcccttgaagagggtgagggtctggaggactcctgtggtgcaggccatctcccggatagagtgccggacgcgtgggctggtgagaagacagcgaaatggcgcctccggcccccggcccggcctccggcggctccggggaggtagacgagctgttcgacgtaaagaacgccttctacatcggcagctaccagcagtgcataaacgaggcgcagcgggtgaagctatcaagcccagagagagacgtggagagggacgtcttcctgtatagagcgtacctggcgcagaggaagttcggtgtggtcctggatgagatcaagccctcctcggcccctgagctccaggccgtgcgcatgtttgctgactacctcgcccacgagagtcggagggacagcatcgtggccgagctggaccgagagatgagcaggagcgtggacgtgaccaacaccaccttcctgctcatggccgcctccatctatctccacgaccagaacccggatgccgccctgcgtgcgctgcaccagggggacagcctggagtgcacagccatgacagtgcagatcctgctgaagctggaccgcctggacctcgcccggaaggagctgaagagaatgcaggacctggacgaggatgccaccctcacccagctcgccactgcctgggtcagcctggccacgggtggtgagaagctgcaggatgcctactacatcttccaggagatggctgacaagtgctcgcccaccctgctgctgctcaatgggcaggcggcctgccacatggcccagggccgctgggaggccgctgagggcctgctgcaggaggcgctagacaaggatagtggctacccggagacgctggtcaacctcatcgtcctgtcccagcacctgggcaagccccctgaggtgacaaaccgatacctgtcccagctgaaggatgcccacaggtcccatcccttcatcaaggagtaccaggccaaggagaacgactttgacaggctggtgctacagtacgctcccagcgcctgaggctggcccagagctgtcaggaccatgaagccaggacagaggccaggagccagccctgcagccctccccacccggcatccacctgcatcccctctgggggcaggagcccacccccagcacccccatctgttaataaatatctcaactccagggtgttccacctgaaaaaaaaaaaaa

SEQ ID NO: 18 - DNA, 12505 bp, Homo sapiens
  CDS (197)..(9967)
ctaccgggcggaggtgagcgcggcgccggctcctcctgcggcggactttgggtgcgacttgacgagcggtggttcgacaagtggccttgcgggccggatcgtcccagtggaagagttgtaaatttgcttctggccttcccctacggattatacctggccttcccctacggattatactcaacttactgtttagaaaatgtggcccacgagacgcctggttactatcaaaaggagcggggtcgacggtccccactttcccctgagcctcagcacctgcttgtttggaaggggtattgaatgtgacatccgtatccagcttcctgttgtgtcaaaacaacattgcaaaattgaaatccatgagcaggaggcaatattacataatttcagttccacaaatccaacacaagtaaatgggtctgttattgatgagcctgtacggctaaaacatggagatgtaataactattattgatcgttccttcaggtatgaaaatgaaagtcttcagaatggaaggaagtcaactgaatttccaagaaaaatacgtgaacaggagccagcacgtcgtgtctcaagatctagcttctcttctgaccctgatgagaaagctcaagattccaaggcctattcaaaaatcactgaaggaaaagtttcaggaaatcctcaggtacatatcaagaatgtcaaagaagacagtaccgcagatgactcaaaagacagtgttgctcagggaacaactaatgttcattcctcagaacatgctggacgtaatggcagaaatgcagctgatcccatttctggggattttaaagaaatttccagcgttaaattagtgagccgttatggagaattgaagtctgttcccactacacaatgtcttgacaatagcaaaaaaaatgaatctcccttttggaagctttatgagtcagtgaagaaagagttggatgtaaaatcacaaaaagaaaatgtcctacagtattgtagaaaatctggattacaaactgattacgcaacagagaaagaaagtgctgatggtttacagggggagacccaactgttggtctcgcgtaagtcaagaccaaaatctggtgggagcggccacgctgtggcagagcctgcttcacctgaacaagagcttgaccagaacaaggggaagggaagagacgtggagtctgttcagactcccagcaaggctgtgggcgccagctttcctctctatgagccggctaaaatgaagacccctgtacaatattcacagcaacaaaattctccacaaaaacataagaacaaagacctgtatactactggtagaagagaatctgtgaatctgggtaaaagtgaaggcttcaaggctggtgataaaactcttactcccaggaagctttcaactagaaatcgaacaccagctaaagttgaagatgcagctgactctgccactaagccagaaaatctctcttccaaaaccagaggaagtattcctacagatgtggaagttctgcctacggaaactgaaattcacaatgagccatttttaactctgtggctcactcaagttgagaggaagatccaaaaggattccctcagcaagcctgagaaattgggcactacagctggacagatgtgctctgggttacctggtcttagttcagttgatatcaacaactttggtgattccattaatgagagtgagggaatacctttgaaaagaaggcgtgtgtcctttggtgggcacctaagacctgaactatttgatgaaaacttgcctcctaatacgcctctcaaaaggggagaagccccaaccaaaagaaagtctctggtaatgcacactccacctgtcctgaagaaaatcatcaaggaacagcctcaaccatcaggaaaacaagagtcaggttcagaaatccatgtggaagtgaaggcacaaagcttggttataagccctccagctcctagtcctaggaaaactccagttgccagtgatcaacgccgtaggtcctgcaaaacagcccctgcttccagcagcaaatctcagacagaggttcctaagagaggaggagaaagagtggcaacctgccttcaaaagagagtgtctatcagccgaagtcaacatgatattttacagatgatatgttccaaaagaagaagtggtgcttcggaagcaaatctgattgttgcaaaatcatgggcagatgtagtaaaacttggtgcaaaacaaacacaaactaaagtcataaaacatggtcctcaaaggtcaatgaacaaaaggcaaagaagacctgctactccaaagaagcctgtgggcgaagttcacagtcaatttagtacaggccacgcaaactctccttgtaccataataatagggaaagctcatactgaaaaagtacatgtgcctgctcgaccctacagagtgctcaacaacttcatttccaaccaaaaaatggactttaaggaagatctttcaggaatagctgaaatgttcaagaccccagtgaaggagcaaccgcagttgacaagcacatgtcacatcgctatttcaaattcagagaatttgcttggaaaacagtttcaaggaactgattcaggagaagaacctctgctccccacctcagagagttttggaggaaatgtgttcttcagtgcacagaatgcagcaaaacagccatctgataaatgctctgcaagccctcccttaagacggcagtgtattagagaaaatggaaacgtagcaaaaacgcccaggaacacctacaaaatgacttctctggagacaaaaacttcagatactgagacagagccttcaaaaacagtatccactgtaaacaggtcaggaaggtctacagagttcaggaatatacagaagctacctgtggaaagtaagagtgaagaaacaaatacagaaattgttgagtgcatcctaaaaagaggtcagaaggcaacactactacaacaaaggagagaaggagagatgaaggaaatagaaagaccttttgagacatataaggaaaatattgaattaaaagaaaacgatgaaaagatgaaagcaatgaagagatcaagaacttgggggcagaaatgtgcaccaatgtctgacctgacagacctcaagagcttgcctgatacagaactcatgaaagacacggcacgtggccagaatctcctccaaacccaagatcatgccaaggcaccaaagagtgagaaaggcaaaatcactaaaatgccctgccagtcattacaaccagaaccaataaacaccccaacacacacaaaacaacagttgaaggcatccctggggaaagtaggtgtgaaagaagagctcctagcagtcggcaagttcacacggacgtcaggggagaccacgcacacgcacagagagccagcaggagatggcaagagcatcagaacgtttaaggagtctccaaagcagatcctggacccagcagcccgtgtaactggaatgaagaagtggccaagaacgcctaaggaagaggcccagtcactagaagacctggctggcttcaaagagctcttccagacaccaggtccctctgaggaatcaatgactgatgagaaaactaccaaaatagcctgcaaatctccaccaccagaatcagtggacactccaacaagcacaaagcaatggcctaagagaagtctcaggaaagcagatgtagaggaagaattcttagcactcaggaaactaacaccatcagcagggaaagccatgcttacgcccaaaccagcaggaggtgatgagaaagacattaaagcatttatgggaactccagtgcagaaactggacctggcaggaactttacctggcagcaaaagacagctacagactcctaaggaaaaggcccaggctctagaagacctggctggctttaaagagctcttccagactcctggtcacaccgaggaattagtggctgctggtaaaaccactaaaataccctgcgactctccacagtcagacccagtggacaccccaacaagcacaaagcaacgacccaagagaagtatcaggaaagcagatgtagagggagaactcttagcgtgcaggaatctaatgccatcagcaggcaaagccatgcacacgcctaaaccatcagtaggtgaagagaaagacatcatcatatttgtgggaactccagtgcagaaactggacctgacagagaacttaaccggcagcaagagacggccacaaactcctaaggaagaggcccaggctctggaagacctgactggctttaaagagctcttccagacccctggtcatactgaagaagcagtggctgctggcaaaactactaaaatgccctgcgaatcttctccaccagaatcagcagacaccccaacaagcacaagaaggcagcccaagacacctttggagaaaagggacgtacagaaggagctctcagccctgaagaagctcacacagacatcaggggaaaccacacacacagataaagtaccaggaggtgaggataaaagcatcaacgcgtttagggaaactgcaaaacagaaactggacccagcagcaagtgtaactggtagcaagaggcacccaaaaactaaggaaaaggcccaacccctagaagacctggctggctggaaagagctcttccagacaccagtatgcactgacaagcccacgactcacgagaaaactaccaaaatagcctgcagatcacaaccagacccagtggacacaccaacaagctccaagccacagtccaagagaagtctcaggaaagtggacgtagaagaagaattcttcgcactcaggaaacgaacaccatcagcaggcaaagccatgcacacacccaaaccagcagtaagtggtgagaaaaacatctacgcatttatgggaactccagtgcagaaactggacctgacagagaacttaactggcagcaagagacggctacaaactcctaaggaaaaggcccaggctctagaagacctggctggctttaaagagctcttccagacacgaggtcacactgaggaatcaatgactaacgataaaactgccaaagtagcctgcaaatcttcacaaccagacctagacaaaaacccagcaagctccaagcgacggctcaagacatccctggggaaagtgggcgtgaaagaagagctcctagcagttggcaagctcacacagacatcaggagagactacacacacacacacagagccaacaggagatggtaagagcatgaaagcatttatggagtctccaaagcagatcttagactcagcagcaagtctaactggcagcaagaggcagctgagaactcctaagggaaagtctgaagtccctgaagacctggccggcttcatcgagctcttccagacaccaagtcacactaaggaatcaatgactaatgaaaaaactaccaaagtatcctacagagcttcacagccagacctagtggacaccccaacaagctccaagccacagcccaagagaagtctcaggaaagcagacactgaagaagaatttttagcatttaggaaacaaacgccatcagcaggcaaagccatgcacacacccaaaccagcagtaggtgaagagaaagacatcaacacgtttttgggaactccagtgcagaaactggaccagccaggaaatttacctggcagcaatagacggctacaaactcgtaaggaaaaggcccaggctctagaagaactgactggcttcagagagcttttccagacaccatgcactgataaccccacagctgatgagaaaactaccaaaaaaatactctgcaaatctccgcaatcagacccagcggacaccccaacaaacacaaagcaacggcccaagagaagcctcaagaaagcagacgtagaggaagaatttttagcattcaggaaactaacaccatcagcaggcaaagccatgcacacgcctaaagcagcagtaggtgaagagaaagacatcaacacatttgtggggactccagtggagaaactggacctgctaggaaatttacctggcagcaagagacggccacaaactcctaaagaaaaggccaaggctctagaagatctggctggcttcaaagagctcttccagacaccaggtcacactgaggaatcaatgaccgatgacaaaatcacagaagtatcctgcaaatctccacaaccagacccagtcaaaaccccaacaagctccaagcaacgactcaagatatccttggggaaagtaggtgtgaaagaagaggtcctaccagtcggcaagctcacacagacgtcagggaagaccacacagacacacagagagacagcaggagatggaaagagcatcaaagcgtttaaggaatctgcaaagcagatgctggacccagcaaactatggaactgggatggagaggtggccaagaacacctaaggaagaggcccaatcactagaagacctggccggcttcaaagagctcttccagacaccagaccacactgaggaatcaacaactgatgacaaaactaccaaaatagcctgcaaatctccaccaccagaatcaatggacactccaacaagcacaaggaggcggcccaaaacacctttggggaaaagggatatagtggaagagctctcagccctgaagcagctcacacagaccacacacacagacaaagtaccaggagatgaggataaaggcatcaacgtgttcagggaaactgcaaaacagaaactggacccagcagcaagtgtaactggtagcaagaggcagccaagaactcctaagggaaaagcccaacccctagaagacttggctggcttgaaagagctcttccagacaccagtatgcactgacaagcccacgactcacgagaaaactaccaaaatagcctgcagatctccacaaccagacccagtgggtaccccaacaatcttcaagccacagtccaagagaagtctcaggaaagcagacgtagaggaagaatccttagcactcaggaaacgaacaccatcagtagggaaagctatggacacacccaaaccagcaggaggtgatgagaaagacatgaaagcatttatgggaactccagtgcagaaattggacctgccaggaaatttacctggcagcaaaagatggccacaaactcctaaggaaaaggcccaggctctagaagacctggctggcttcaaagagctcttccagacaccaggcactgacaagcccacgactgatgagaaaactaccaaaatagcctgcaaatctccacaaccagacccagtggacaccccagcaagcacaaagcaacggcccaagagaaacctcaggaaagcagacgtagaggaagaatttttagcactcaggaaacgaacaccatcagcaggcaaagccatggacaccccaaaaccagcagtaagtgatgagaaaaatatcaacacatttgtggaaactccagtgcagaaactggacctgctaggaaatttacctggcagcaagagacagccacagactcctaaggaaaaggctgaggctctagaggacctggttggcttcaaagaactcttccagacaccaggtcacactgaggaatcaatgactgatgacaaaatcacagaagtatcctgtaaatctccacagccagagtcattcaaaacctcaagaagctccaagcaaaggctcaagatacccctggtgaaagtggacatgaaagaagagcccctagcagtcagcaagctcacacggacatcaggggagactacgcaaacacacacagagccaacaggagatagtaagagcatcaaagcgtttaaggagtctccaaagcagatcctggacccagcagcaagtgtaactggtagcaggaggcagctgagaactcgtaaggaaaaggcccgtgctctagaagacctggttgacttcaaagagctcttctcagcaccaggtcacactgaagagtcaatgactattgacaaaaacacaaaaattccctgcaaatctcccccaccagaactaacagacactgccacgagcacaaagagatgccccaagacacgtcccaggaaagaagtaaaagaggagctctcagcagttgagaggctcacgcaaacatcagggcaaagcacacacacacacaaagaaccagcaagcggtgatgagggcatcaaagtattgaagcaacgtgcaaagaagaaaccaaacccagtagaagaggaacccagcaggagaaggccaagagcacctaaggaaaaggcccaacccctggaagacctggccggcttcacagagctctctgaaacatcaggtcacactcaggaatcactgactgctggcaaagccactaaaataccctgcgaatctcccccactagaagtggtagacaccacagcaagcacaaagaggcatctcaggacacgtgtgcagaaggtacaagtaaaagaagagccttcagcagtcaagttcacacaaacatcaggggaaaccacggatgcagacaaagaaccagcaggtgaagataaaggcatcaaagcattgaaggaatctgcaaaacagacaccggctccagcagcaagtgtaactggcagcaggagacggccaagagcacccagggaaagtgcccaagccatagaagacctagctggcttcaaagacccagcagcaggtcacactgaagaatcaatgactgatgacaaaaccactaaaataccctgcaaatcatcaccagaactagaagacaccgcaacaagctcaaagagacggcccaggacacgtgcccagaaagtagaagtgaaggaggagctgttagcagttggcaagctcacacaaacctcaggggagaccacgcacaccgacaaagagccggtaggtgagggcaaaggcacgaaagcatttaagcaacctgcaaagcggaacgtggacgcagaagatgtaattggcagcaggagacagccaagagcacctaaggaaaaggcccaacccctggaagacctggccagcttccaagagctctctcaaacaccaggccacactgaggaactggcaaatggtgctgctgatagctttacaagcgctccaaagcaaacacctgacagtggaaaacctctaaaaatatccagaagagttcttcgggcccctaaagtagaacccgtgggagacgtggtaagcaccagagaccctgtaaaatcacaaagcaaaagcaacacttccctgcccccactgcccttcaagaggggaggtggcaaagatggaagcgtcacgggaaccaagaggctgcgctgcatgccagcaccagaggaaattgtggaggagctgccagccagcaagaagcagagggttgctcccagggcaagaggcaaatcatccgaacccgtggtcatcatgaagagaagtttgaggacttctgcaaaaagaattgaacctgcggaagagctgaacagcaacgacatgaaaaccaacaaagaggaacacaaattacaagactcggtccctgaaaataagggaatatccctgcgctccagacgccaagataagactgaggcagaacagcaaataactgaggtctttgtattagcagaaagaatagaaataaacagaaatgaaaagaagcccatgaagacctccccagagatggacattcagaatccagatgatggagcccggaaacccatacctagagacaaagtcactgagaacaaaaggtgcttgaggtctgctagacagaatgagagctcccagcctaaggtggcagaggagagcggagggcagaagagtgcgaaggttctcatgcagaatcagaaagggaaaggagaagcaggaaattcagactccatgtgcctgagatcaagaaagacaaaaagccagcctgcagcaagcactttggagagcgaatctgtgcagagagtaacgcggagtgtcaagaggtgtgcagaaaatccaaagaaggctgaggacaatgtgtgtgtcaagaaaataagaaccagaagtcatagggacagtgaagatatttgacagaaaaatcgaactgggaaaaatataataaagttagttttgtgataagttctagtgcagtttttgtcataaattacaagtgaattctgtaagtaaggctgtcagtctgcttaagggaagaaaactttggatttgctgggtctgaatcggcttcataaactccactgggagcactgctgggctcctggactgagaatagttgaacaccgggggctttgtgaaggagtctgggccaaggtttgccctcagctttgcagaatgaagccttgaggtctgtcaccacccacagccaccctacagcagccttaactgtgacacttgccacactgtgtcgtcgtttgtttgcctatgtcctccagggcacggtggcaggaacaactatcctcgtctgtcccaacactgagcaggcactcggtaaacacgaatgaatggatgagcgcacggatgaatggagcttacaagatctgtctttccaatggccgggggcatttggtccccaaattaaggctattggacatctgcacaggacagtcctatttttgatgtcctttcctttctgaaaataaagttttgtgctttggagaatgactcgtgagcacatctttagggaccaagagtgactttctgtaaggagtgactcgtggcttgccttggtctcttgggaatacttttctaactagggttgctctcacctgagacattctccacccgcggaatctcagggtcccaggctgtgggccatcacgacctcaaactggctcctaatctccagctttcctgtcattgaaagcttcggaagtttactggctctgctcccgcctgttttctttctgactctatctggcagcccgatgccacccagtacaggaagtgacaccagtactctgtaaagcatcatcatccttggagagactgagcactcagcaccttcagccacgatttcaggatcgcttccttgtgagccgctgcctccgaaatctcctttgaagcccagacatctttctccagcttcagacttgtagatataactcgttcatcttcatttactttccactttgccccctgtcctctctgtgttccccaaatcagagaatagcccgccatcccccagatcacctgtctggattcctccccattcacccaccttgccaggtgcaggtgaggatggtgcaccagacagggtagctgtcccccaaaatgtgccctgtgcgggcagtgccctgtctccacgtttgtttccccagtgtctggcggggagccaggtgacatcataaatacttgctgaatgaatgcagaaatcagcggtactgacttgtactatattggctgccatgatagggttctcacagcgtcatccatgatcgtaagggagaatgacattctgcttgagggagggaatagaaaggggcagggaggggacatctgagggcttcacagggctgcaaagggtacagggattgcaccagggcagaacaggggagggtgttcaaggaagagtggctcttagcagaggcactttggaaggtgtgaggcataaatgcttccttctacgtaggccaacctcaaaactttcagtaggaatgttgctatgatcaagttgttctaacactttagacttagtagtaattatgaacctcacatagaaaaatttcatccagccatatgcctgtggagtggaatattctgtttagtagaaaaatcctttagagttcagctctaaccagaaatcttgctgaagtatgtcagcaccttttctcaccctggtaagtacagtatttcaagagcacgctaagggtggttttcattttacagggctgttgatgatgggttaaaaatgttcatttaagggctacccccgtgtttaatagatgaacaccacttctacacaaccctccttggtactgggggagggagagatctgacaaatactgcccattcccctaggctgactggatttgagaacaaatacccacccatttccaccatggtatggtaacttctctgagcttcagtttccaagtgaatttccatgtaataggacattcccattaaatacaagctgtttttactttttcgcctcccagggcctgtgcgatctggtcccccagcctctcttgggctttcttacactaactctgtacctaccatctcctgcctcccttaggcaggcacctccaaccaccacacactccctgctgttttccctgcctggaactttccctcctgccccaccaagatcatttcatccagtcctgagctcagcttaagggaggcttcttgcctgtgggttccctcacccccatgcctgtcctccaggctggggcaggttcttagtttgcctggaattgttctgtacctctttgtagcacgtagtgttgtggaaactaagccactaattgagtttctggctcccctcctggggttgtaagttttgttcattcatgagggccgactgtatttcctggttactgtatcccagtgaccagccacaggagatgtccaataaagtatgtgatgaaatggtcttaaaaaaaaaaa

SEQ ID NO: 19 - DNA, 1309 bp, Homo sapiens
  CDS (1)..(984)
atgggcaagtgggaatttatagccaacgaatacggtggggcctatatttacaagtttttccgggtcgccgagaagggtcacgcacaggattgcgacctcgattggaacgcgcttcccgaaaggggcatgcgcagagaggtcgtagtcgcgtctgaggatgagctcgctgcatcggggctgccgagctgcgatgccgccgtcaacctggccggagagaacatcctcaaccctctccgaaggtcagcccgggccctaaagctgatacccactagagcacagggaggacagtgccccactgatgagaacctatggaatgaaaccttccaaaaagaggtaatcggcagccgcctagagaccacccaattgctggctaaagccatcaccaaagccccacaaccccccaaggcctgggtcttagtcacaggtgtagcttactaccagcccagtctgactgcggagtatgatgaagacagcccaggaggggactttgactttttctccaacctcgtaaccaaatgggaagctgcagccaggcttcctggagattctacacgccaggtggtggtgcgctcaggggttgtgctgggccgtgggggtggtgccatgggccacatgctgctgccctttcgcctgggcctggggggccccatcggctcaggccaccaattcttcccctggatacacatcggggacctggcaggaatcctgacccatgcccttgaagcaaaccacgtgcacggggtcctgaatggagtggctccatcctccgccactaatgctgagtttgcccagaccttcggtgctgccctgggccgccgagccttcatccctctccccagcgctgtggtgcaagctgtctttgggcgacagcgtgccatcatgctgctggagggccagaaggtgatcccacggcgaacactggccactggctaccagtattccttcccagagctaggggctgccttaaaggaaattgtagcctaagtaggtcatggcaagggcctgaggcctgttcctcacaggcttccaggttaggcactgtgaataggctcagctcctctagagagctgaagccatctggttcttagattcctctcccagtcctctttcccattgttctgttgctccaccttattgtctcaaggccgtaatctcatcaggttgggacattaatcttttcaactccttgtaagatttcccggtttggtttctctacatgtcctgcagctgccccacttctcctttacgctgtgtagagaatgctctgcagtttaggcaataaaaataaattgtctcactaaaaaaaaaa

SEQ ID NO: 20 - DNA, 1852 bp, Homo sapiens
  CDS (1)..(1791)
atgcctgtaatcccagctactcaggaggctgaggcagaagaatcgctcgatcctgggaggcggaggttgcgaaccattggaaagttggagccatcctacgtgatccgcaagtttctggatgcccagcgcattcacaacctgactgcctacctgcagaccctgcaccgacaatccctggccaatgccgaccataccaccctgctcctcaactgctataccaagctcaaggacagctcgaagctggaggagttcatcaagaaaaagagtgagagtgaagtccactttgatgtggagacagccatcaaggtcctccggcaggctggctactactcccatgccctgtatctggcggagaaccatgcacatcatgagtggtacctgaagatccagctagaagacattaagaattatcaggaagcccttcgatacatcggcaagctgccttttgagcaggcagagagcaacatgaagcgctacggcaagatcctcatgcaccacataccagagcagacaactcagttgctgaagggactttgtactgattatcggcccagcctcgaaggccgcagcgatagggaggccccaggctgcagggccaactctgaggagttcatccccatctttgccaataacccgcgagagctgaaagccttcctagagcacatgagtgaagtgcagccagactcaccccaggggatctacgacacactccttgagctgcgactgcagaactgggcccacgagaaggatccacaggtcaaagagaagcttcacgcagaggccatttccctgctgaagagtggtcgcttctgtgacgtctttgacaaggccctggtcctgtgccagatgcacgacttccaggatggtgtcctttacctttatgagcaggggaagctgttccagcagatcatgcactaccacatgcagcacgagcagtaccggcaggtcatcagcgtgtgtgagcgccatggggagcaggacccctccttgtgggagcaggccctcagctacttcgctcgcaaggaggaggactgcaaggagtatgtggcagctgtcctcaagcatatcgagaacaagaacctcatgccacctcttctaggtacttgggaagacagatgggatgagctgcgggtgcggcggtaccgagaggagaccacccgtatccgccaggagatccaagagctcaaggccagtcctaagattttccaaaagaccaagtgcagcatctgtaacagtgccttggagttgccctcagtccacttcctgtgtggccactccttccaccaacactgctttgagagttactcggaaagtgatgctgactgccccacctgcctccctgaaaaccggaaggtcatggatatgatccgggcccaggaacagaaacgagatctccatgatcaattccagcatcagccgcctaaggacgacaagaagaagaaggacgctggaaagtcggccaagaaagacaaagacccagtgaacaaatccgggggcaaggccaaaaagaagaagtggtccaaaggcaaagttcgggacaagctcaataacttagtcttgtttgacaaagctacctatgataaactctgtaaggaagttcccaactataaacttataaccccagctgtggtctctgagagactgaagattcgaggctccctggccagggcagcccttcaggagctccttagtaaaggacttatcaaactggtttcaaagcacagagctcaagtaatttacaccagaaataccaagggtggagatgctccagctgctggtgaagatgcatgaataggtccaaccagctgtacatttggaaaaataaaactttattaaatcaaaaaaaaaaaaa

SEQ ID NO: 21 - DNA, 1584 bp, Homo sapiens
  CDS (14)..(907)
gcacgaggtcaagatggcgggagcagctacccaggcttccctggagtcggccccacggatcatgcggctggtggccgaatgcagccgctccagggcccgggcaggcgagctgtggctgccgcatgggacagtggccactcctgtgttcatgccagtgggcacgcaggccaccatgaagggcatcacgaccgaacagctggacgctctgggttgccgcatctgcctgggcaatacctaccatctgggtctaaggccgggacccgagctgatccagaaagccaacggtctccacggcttcatgaattggcctcataatctgctaacggacagcggcggtttccagatggtgtcgctggtgtctctgtccgaggtgacggaggagggcgtccgcttccgctccccctacgacggcaatgagaccctgctgagcccggagaaatccgtgcagatccagaatgcgctgggctcggacatcatcatgcagctggacgacgtggttagcagtactgtgactgggccacgtgtggaggaggccatgtacaggtcaatccgctggctggaccggtgcattgcagcccatcagcggccggacaagcagaacctcttcgccattatccagggtgggctggacgcagatctccgggccacctgccttgaagagatgaccaagcgagacgtgcctggcttcgccatcgggggcctgagcgggggtgagagcaagtcgcagttctggcggatggtggcgctgagcacctctcggctgccgaaggacaagccccgatatctgatgggggttgggtatgttgtggatagggaagccagagccctacctgtgggaagtggattcctggggaccccctaccctgcttggggaggtggcatttgggggaaacggacacaggtctgatctgaggagactaggaagacatggctgtcccttgggggccattctgagggaatatggcccagtctggggcagtgtgagggttgggaggggccctgggaagcccctgaggttctctgccccctcccgtcatggctgcaaccccagctatgccactgatctggtagtctgcgtggctcttggatgtgacatgttcgactgcgtcttccccacacggacagcgcgctttggctctgccctggtgcccactgggaacctgcagttgaggaagaaggtgtttgagaaggacttcggccccatagacccggagtgcacctgccccacgtgccaaaagcacagccgcgccttcctgcacgcactgctgcacagtgacaacacggccgcgctgcaccacctcacggtccacaacatcgcctaccagctgcagctcatgagcgccgtccgcaccagcatcgtggagaagcgcttcccggacttcgtgcgggacttcatgggcgccatgtacggggatcccaccctctgtcccacctgggccactgacgctctggcctctgtgggaatcacactgggctgacctggcattgggagagggagggaggaaggaagggagggaggggctggaagatactgaaggattcctttttgaaaggttttttttattgtaacttaaaaaaaaaaaa

SEQ ID NO: 22 - DNA, 1683 bp, Homo sapiens
  CDS (640)..(1110)
atttggccctcgaggccaagaattcggcacgaggaaagttctttgtgtcaatggatttatcccactgaacaatttgaatgaagacaatgtggaatggctttgagatacagttcagtttttattaggcatcaatttgtattggtgtgaacttttcaaaatgtaaatcatatatgcagtttctttggtatgacctgtgttaactcagattcagagaatttataatgtatttttttaataacataagaaaacttttctgatattcctctagttttggattgccaaaatattcacagtagaggaaaactgagaaaacgtaggaaaccattctttatacttgcatgtaaacatcttccagcaacaatcatttattgttaaacctggaaaaagccattacacaggaaacctctgttgatataagcgatgatgggaaaggctatttagccactctgcatatttaatgctcatgatcaacatctgcttcctatagctgggatgatatgggggaagatatttatcccttctggggatcatatataaatgatgatagtagtacctacagtatagtgctgttagaattacatgagttagatgtggaggtcagagtggaagcaggtgtgagagggtcccgcagaagaaaacatggctgccaaagtgtttgagtccatcggcaagtttggcctggccttagctgttgcaggaggcatggtgaactctgccttatgtaatgtggatgctgggcacagagctgccatctttgaccaattccgtggagtacagaacattgtggtaggggaagggactcactttctcatcccatgtgtacaaaaaccaattatctttgactgctgttctcaaccacgtagtgcgccagtcatcactggtagcaaagatttacagaatgtcaacatcacactgtgcatcctcttccggcccatcactagccagcttcctcgcatcttcaccagcattggagaggactacgatgagtgtgtgctgccgttcattaccacggagatcctcaagtcactggtggctcgctttgatgctggagaactaatcacccagagggagctggtctccagccaggtgagcaacaaccttatggagtgagcagccacctttgggctcattctggacgacgtgtctttgacacatctgaccttcttgaaggagttaacagacaggtggccccccaggaagcagagagcgccagatttgtggtggaaaaggcggccatcatctctgctgagggtgactccaaggcagctgagctgatcgccaactcactggccactgcaggggacggccagagcgagctgtgcaagctggaagctgcagaagacattgcataccagctctcatgctctcggaacatcacctgcctgccggcagggcagtccgtgctcctccagctgccctagtgaggccccagcctacctgcacctccgtgaggcaactgggccacagccccgatgattcgtaacaccacctttcgccctcaccccagaaatcactgaaatttcatgattggcttaaagtgaaggaagtaaaggtaaaatcacttcagatctctaaaaaacaaagaattacatgagttagtacatgaaaaaattatgggaaactacatgaaatatactgttacgttcaataaacattagcttctgtatataataaaaaaaaaaa

SEQ ID NO: 23 - DNA, 1744 bp, Homo sapiens
  CDS (85)..(1548)
ggccggaattcccgggtcgacgatgtcgtcctgttccgggcggggttggggcggaagggctgccaggcgcccagctgtgcccagatggatgggacagagacccggcagcggaggctggacagctgtggcaagccaggggagctggggcttcctcaccccctcagcacaggaggactccctgtagcctcagaagatggagctctcagggcccctgagagccaaagcgtgacccccaagccactggagactgagcctagcagggagaccgcctggtccataggccttcaggtgaccgtgcccttcatgtttgcaggcctgggactgtcctgggccggcatgcttctggactatttccagcactggcctgtgtttgtggaggtgaaagaccttttgacattggtgccgcccctggtgggcctgaaggggaacctggagatgacactggcatccagactctccacagctgccaacactggacaaattgatgacccccaggagcagcacagagtcatcagcagcaacctggccctcatccaggtgcaggccactgtcgtggggctcttggctgctgtggctgcgctgctgttgggcgtggtgtctcgagaggaagtggatgtcgccaaggtggagttgctgtgtgccagcagtgtcctcactgccttccttgcagcctttgccctgggggtgctgatggtctgtatagtgattggtgctcgaaagctcggggtcaacccagacaacattgccacgcccattgcagccagcctgggagacctcatcacactgtccattctggctttggttagcagcttcttctacagacacaaagatagtcggtatctgacgccgctggtctgcctcagctttgcggctctgaccccagtgtgggtcctcattgccaagcagagcccacccatcgtgaagatcctgaagtttggctggttcccaatcatcctggccatggtcatcagcagtttcggaggactcatcttgagcaaaaccgtttctaaacagcagtacaaaggcatggcgatatttacccccgtcatatgtggtgttggtggcaatctggtggccattcagaccagccgaatctcaacctacctgcacatgtggagtgcacctggcgtcctgcccctccagatgaagaaattctggcccaacccgtgttctactttctgcacgtcagaaatcaattccatgtcagctcgagtcctgctcttgctggtggtcccaggccatctgattttcttctacatcatctacctggtggagggtcagtcagtcataaacagccagacctttgtggtgctctacctgctggcaggcctgatccaggtgacaatcctgctgtacctggcagaagtgatggttcggctgacttggcaccaggccctggatcctgacaaccactgcatcccctaccttacagggctgggggacctgctcggtactggcctcctggcactctgctttttcactgactggctactgaagagcaaggcagagctgggtggcatctcagaactggcatctggacctccctaactgggccccgctggtcccatttgctcattagaatttcctctcacatcagtgggatacagaattcagtttctcccttgccaggtccttgggatggttgacccctgcctctgcagtagccttttgtgagtctgctaaggtagctctcacacacctcggctctggggttgatacctgagcctgcaatagagccctgaaa

SEQ ID NO: 24 - DNA, 2489 bp, Homo sapiens
  CDS (876)..(2399)
ctactgtgttggcggactggcgggactgggtgctgcgtgagtctctgagcgcagtgcgggcggctggcgcccctcccccggcagcgtgcggcggctggctgtgcggctggcggcggcgtgcggcagctcactcagcccggtcggcgacgccggaacctctgcttgggaaggggacggtgcggtcccactgggggcaatgggtgcgctagcggcggccggcttgttgtcttccggcggctgcctctcccgtgcggaagtcgccagatgggtgatgcgccgggcatttggtggtcgtttgatgtggaatgtggatgagtggtgggtgggtgggggtggttggtacggtcgggcggtggtacggtgttgtcgattcagcttcatcccgtgaggaggtagattgggcatgtgcatgggctccgtgttgaagatcctcaaaaccaacagcacacagcttccagcgcatgctcctttccccaagaccctgtgggggaacccgccgccagcgcggagccaccgtgactcgtagcctgacttccgtttccgggggcggcttccggcggcgtgaccgcaagaggccaatggagtgtgggagctgaaagggtcttcgctggcggccggtaactggcggcggttgggaacggccgagtgtggctcttctggtgtttcagcttggggagagaggggtggccttcttcttgcagttgaggccggcgccgagccggacttcagccggatctcgtggcggagcccatcttgctccctctcccaggcctttacccgctccctaggattcccgggccctgtaggtgggagttgggagacgacagtactgcttttaaagagacagtgttagggatcttggaagcacagccaacatgtgtgacattgaagaagccactaaccaactcctagatgtgaaccttcatgagaaccagaagtctgtacaagtgacagaaagtgacctcggaagtgaatctgagcttctagtcactattggagccactgtacctactggctttgagcaaacagctgcagatgaagtcagagagaaacttgggtcatcatgcaaaatcagcagagaccgtggcaagatatattttgtcatttcagtggaaagtctggcacaggttcattgtctgagatcagttgataacttatttgtggtggttcaggagtttcaagattaccagttcaaacaaacaaaggaagaagttctaaaggattttgaagacttggctggaaaactcccatggtcaaaccccttaaaagtgtggaaaattaatgccagttttaaaaagaaaaaagcaaagcgcaaaaagataaatcagaattcaagtaaagagaagattaataatggacaagaagtcaaaatcgatcagagaaatgttaaaaaagagttcactagccatgctttagattctcatatcttagattattatgaaaatccagccatcaaagaggatgtatcaacattaataggtgatgatttggcatcttgcaaagatgagactgatgaaagctcaaaagaagaaactgagcctcaagtgctgaagtttagagtcacatgcaacagggcaggagagaaacattgctttacctcaaatgaggctgcaagagattttgggggtgctgttcaagattattttaagtggaaggccgacatgaccaactttgatgtggaggttcttttgaacatccatgataatgaagtcattgtgggcattgcattgactgaagagagtctccaccgaagaaatataacacattttggacctacaactcttagatcaactcttgcctatgggatgctcaggctctgtgatcctctaccttatgatataatagtcgatccaatgtgtggaactggggcaataccaatagagggggccactgaatggtctgactgtttccatattgctggtgataataatccactggctgtgaatagagcagcaaataacattgcatctttattgaccaagagccaaattaaagaaggcaaaccctcctggggcttgcccatagatgctgttcagtgggatatctgcaatctgccattgagaactggctctgtggatattattgtaacagatttgccatttggaaaaaggatgggatccaagaagagaaactggaacctttatccagcttgcctacgggagatgagccgtgtctgcacacctaccacaggccgagctgtactacttactcaagacacaaaatgctttaccaaggcgttatctggaatgcgacacgtatggcgaaaggtggatacagtctgggtgaacgttggtggtcttcgtgctgcagtttacgttctgatacgtacacctcaagcttttgttcatccttcagaacaagacggagaaagaggaactctttggcaatgcaaagaatgaagatgactaatagtacttgtacttcccaccactggaaatgttagcataaaagaacttggagaggaaaaaagtattaacaaaaaaaaaaaa

SEQ ID NO: 25 - DNA, 1225 bp, Homo sapiens
  CDS (209)..(1009)
aaaatcgataggccgatggataaaccacctattcgatgatgaagataccccaccaaacccaaaaaaagagatctctcgaggatccgaattcgcggccgcgtcgacgctaggtttgcaaagctgtgggctgagcactcaggcaatcacactctcagaaactgcggcggctctggactgcagcctcccaaggctccatgccagacaaagcatgcgtgtcacacttgctacaatagcctggatggtttcttttgtctccaattattcacacacagcaaatattttgccagatatcgaaaatgaagatttcatcaaagactgcgttcgaatccataacaagttccgatcagaggtgaaaccaacagccagtgatatgctatacatgacttgggacccagcactagcccaaattgcaaaagcatgggccagcaattgccagttttcacataatacacggctgaagccaccccacaagctgcacccaaacttcacttcactgggagagaacatctggactgggtctgtgcccattttttctgtgtcttccgccatcacaaactggtatgacgaaatccaggactatgacttcaagactcggatatgcaaaaaagtctgtggccactacactcaggttgtttgggcagatagttacaaagttggctgcgcagttcaattttgccctaaagtttctggctttgacgctctttccaatggagcacattttatatgcaactacggaccaggagggaattacccaacttggccatataagagaggagccacctgcagtgcctgccccaataatgacaagtgtttggacaatctctgtgttaaccgacagcgagaccaagtcaaacgttactactctgttgtatatccaggctggcccatatatccacgtaacagatacacttctctctttctcattgttaattcagtaattctaatactgtctgttataattaccattttggtacagcacaagtaccctaatttagttcttttggactaatacaattcaggaaagaaaaaacccaaaaaccaacctcattcacatatggctttttttttaaccaataacaattaggtgtacttctattttaaaacatttcagaaaaaaatatatgttatagcaatactcttactcaaaagaagaaatttcctaactctatcagataaactcatctttagtataaataagcattatttgcaggttgccacaggtgga

SEQ ID NO: 26 - DNA, 4541 bp, Homo sapiens
  CDS (135)..(2807)
cttcgaccccattgatgtatatggagacccacgctggctagcgtttaaacttaagcttggtaccgagctcggatccactagtccagtgtggtggaattcaaggcggccacgcgcggcgccgctcggtgcagaccatgaattacgtggggcagttagccggccaggtgtttgtcaccgtgaaggagctctacaaggggctgaatcccgccacactctcagggtgcattgacatcattgtcatccgccagcccaatggaaacctccaatgctcccctttccacgtccgctttgggaagatgggggtcctgcgctcccgagagaaagtggttgacatagaaatcaatggggaatctgtggatttgcatatgaaattgggagataatggagaagcattttttgttcaagaaacagataatgatcaggaagttatccctatgcacctggccacctcccccatcctgtcagaaggagcttcgagaatggaatgccagctgaaaaggggctctgtggacaggatgagaggcctggaccccagcacgccagcccaagtgatcgctcccagcgagacgccgtcaagcagctctgtagtaaagaagagaagaaaaaggaggagaaagtcacagctggacagcctgaagagagatgacaacatgaacacatctgaggatgaggacatgttccccatcgagatgagctcggatgaggccatggagctgctggagagcagcagaactcttcctaatgatatacctccattccaagatgatattcctgaggaaaacctctccctggctgtgatttaccctcagtcagcctcataccctaattcggatagagagtggtcacccactcccagtccttccggttcccgaccttcaacacctaaaagtgattcagaattggtcagcaagtccacggaaaggacagggcagaagaacccagaaatgctttggctgtggggagagctgccgcaggctgctaagtcttcttctccacacaagatgaaagagtccagcccattgagcagtagaaaaatttgtgataaaagtcactttcaggccattcacagcgaatcttcagacacttttagtgaccaatcgccaactctggtcggtggggcacttttggaccagaacaagcctcagacagaaatgcagtttgtgaatgaagaagacctggagaccttaggagcagcagcgccactcttgcccatgatcgaggagctcaaacccccctctgccagtgtagtccagacagcaaacaagacggattctccttccaggaaaagagataaacgaagccgacatcttggtgctgacggcgtctacttggatgacctcacagacatggatcctgaagtggcggccctgtattttcccaaaaacggagatccttccggactcgcaaaacatgcaagcgacaacggagcccggtcagccaaccagtccccgcagtcggtgggcagctcgggcgtggacagtggcgtggagagcacctcggacgggctgagggacctcccttccatcgccatctccctctgcgggggcctcagcgaccaccgggagatcacgaaagatgcattcctggagcaagctgtgtcatatcaacagtttgtggacaaccccgctattatcgatgaccccaatctcgtggtaaagattgggagtaaatattataactggacaacagcagcacccctcctcctggcaatgcaggccttccagaaacctttgccaaaggccactgtggaatctatcatgagggataaaatgcccaaaaagggaggaagatggtggttttcatggaggggaagaaacaccacaatcaaggaggaaagtaagccagagcagtgcttggctggcaaggcccatagcaccggagagcaaccgccgcagctcagcttggccaccagggtaaagcatgaatcatcctccagtgatgaggagcgcgcagctgccaagccatcaaacgcaggccacctccctcttctgcctaatgtcagctacaagaagactctccggctgacttccgagcagcttaaaagcttgaagttgaagaatggccccaacgacgtggttttcagtgtcaccacgcagtaccaaggcacgtgccgctgtgagggcaccatctatctgtggaactgggatgataaagtcatcatttctgatattgatgggacaattaccagatcagatactcttggccacattttgcccacccttgggaaggattggacccatcagggcatcgctaagctgtaccataaagtgagccagaatggatataaatttctctactgttctgcccgtgccatcgggatggcggacatgacgcggggctacctgcactgggtcaacgagaggggcacggtgctgccccaggggcccctgctgctgagtcccagcagcctcttctctgccctgcacagagaagtgattgaaaagaagccagaaaagtttaaagtccagtgtttgacagacatcaaaaacctgtttttccccaacacagaacccttttatgctgcttttggaaaccgaccagctgatgtgtattcatacaagcaagtaggagtgtctttgaatagaatatttaccgtcaaccctaaaggagagctggtacaggaacatgcaaagaccaacatctcttcgtatgtgagactctgtgaagtagtcgaccacgttttcccgttgctgaaaagaagccattcttcagactttccctgttcggataccttcagtaacttcaccttttggagagagccactgccaccttttgaaaaccaggacattcattctgcctcagcgtaaaatgtcccaagcagcctcttgccagcagtgcagagcctggttgtcacccattaaaggataggtctccccggagtgcacagctccacctgggagcctggcgcgtcatcattggcctgacagcagagagaattgagaagcatttctcccctgccccaccccggggctgacatttctaagcaagataggaagggagcactttctaggctaggagttgggtgcatttgtaccgtgaaaagcattcctcagttgtggcttaatgccagttacgacgctgcctttccggcctgctccagcaagtagctactggttcacgtgcagtttggggctgtgaaacctaggcagaaggcggctgtctgagggctgtccccgcctaggacagggtcaatcgaggaatgccagatgtgcacggtttttggcaaagtagggggcacatttccattatagcaatgttagtgccaccaccttctgaacacagtggggagggctgtgaaggctcatgtgacctggatctgaggtctctgatagaaatctggacgccaccgggtccaggcctggcctcagacttggccttgtggatgggccccttacagtatttgctgactagtctcatttttaggtgataagtttttctttaattcctttggttaaagatagtctatttcattggcatatctccccccagtttttgtggctcaaggctggaatatttatgccttaatatatctatggcagacatttaagaatgcgctttatctagctcatggtaactttgcaacgccttagattaaaatgacagtaaatattactaaggcagtattttgaatgagtttgacactgccggcttccttccatccagcgaggtggtgctgacagtgtggacttgagcacacttatgccaaatgataatgatactgacttctgttgggagctctccaaagaaactggttggttttaagaaaatagtttcaagaagttcaactatattcttttagatattatgtattgttttactctgattaggttactgtgataggcatttattcatattctttctataccactgtcattaatatattaaaaagatgtatgtgttagactatcaaaagggccttattctctctttctcatagactgaccttcttttggaatttctgagtcatttattttccttagctttttccactcaaattaagggcaagcgaaaaagtaataatttggcattctttaagcctacagaatgtgattctttcacttgtttattacactggctcgtggacagaacaatttgaaaagtgaaagaattattttggtaaaagattttgctttacttttcgaagcattatttttttaaagagtgttttactccaacgattgaaacattttcctatttaaatttcatcgttagaatcacaggaggcaaaaaatggaacggttgaatgaaattttactctttctgtgaaagaaaatccacagagttgttgcctccgttgtagttggtgggccccgttagcattggatgcctttgccaaatggttcatgtggacacacaaaggcaaacagatctgccatcgatcgcagatttctgtagaaacacggatgtgcatgtgcagattcccttttgcaggtattaaaaataattaaaaatagtcctgcctgaggttgcagtgagccgagcttgcactactgcactccagcctgggtgacagagtaagactccatgtcaaaaaaaaaaaa

SEQ ID NO: 27 - DNA, 920 bp, Homo sapiens
  CDS (280)..(678)
caacacaggggcagtctccaggacctccacaccattaacaagatgagccttgtgctcccttgggctctagagaggaagcccctctgagccctcagcccctctttcctccctctcctaaagtaatttgatcctcaggaatttgttctgccctcatctggccctggccagctctgcatttgacaaatgccaggaagaggaaactgttgagaaaacggaactactggggaaagggagggctcactgagaaccatcccggtaacccgaccgccgctggtcaccatgaaccacattgtgcaaaccttctctcctgtcaacagcggccagcctcccaactacgagatgctcaaggaggagcaggaagtggctatgctgggggcgccccacaaccctgctcccccgacgtccaccgtgatccacatccgcagcgagacctccgtgcctgaccatgtcgtctggtccctgttcaacaccctcttcatgaacacctgctgcctgggcttcatagcattcgcctactccgtgaagtctagggacaggaagatggttggcgacgtgaccggggcccaggcctatgcctccaccgccaagtgcctgaacatctgggccctgattttgggcatcttcatgaccattctgctcgtcatcatcccagtgttggtcgtccaggcccagcgatagatcaggaggcatcattgaggccaggagctctgcccgtgacctgtatcccacgtactctatcttccattcctcgccctgcccccagaggccaggagctctgcccttgacctgtattccacttactccaccttccattcctcgccctgtccccacagccgagtcctgcatcagccctttatcctcacacgcttttctacaatggcattcaataaagtgtatatgtttctggtaaaaaaaaaaaa

SEQ ID NO: 28 - DNA, 760 bp, Homo sapiens
  CDS (90)..(725)
aaggatccttaattaaattaatcccccccccccccccgctttccgctcggctgttttcctgcgcaggagccgcagggccgtaggcagccatggcgcccagccggaatggcatggtcttgaagccccacttccacaaggactggcagcggcgcgtggccacgtggttcaaccagccggcccgtaagatccgcagacgtaaggcccggcaagccaaggcgcgccgcatcgccccgcgccccgcgtcgggtcccatccggcccatcgtgcgctgccccacggttcggtaccacacgaaggtgcgcgccggccgcggcttcagcctggaggagctcagggtggccggcattcacaagaaggtggcccggaccatcggcatttctgtggatccgaggaggcggaacaagtccacggagtccctgcaggccaacgtgcagcggctgaaggagtaccgctccaaactcatcctcttccccaggaagccctcggcccccaagaagggagacagttctgctgaagaactgaaactggccacccagctgaccggaccggtcatgcccgtccggaacgtctataagaaggagaaagctcgagtcatcactgaggaagagaagaatttcaaagccttcgctagtctccgtatggcccgtgccaacgcccggctcttcggcatacgggcaaaaagagccaaggaagccgcagaacaggatgttgaaaagaaaaaataaagccctcctggggacttggaatcaaaaaaaaaaaa

SEQ ID NO: 29 - DNA, 1486 bp, Homo sapiens
  CDS (629)..(1402)
taagcttgcggccgcggagctgggaaggccgagggcgccgggcacgtctgtgcagatttctttagagtccaggtctgtcgcccgcgtcttcgtcggtggcagcagggctgactggccacggcggccatctgctagagcgcatttcttcccatgaaacgccacctcctccgaagtgcggagcgaacgcagccaaatctacacaaagactgacaagctggatccactcgacggaacccagggccaaaaaacggcggcgagcagcgcctcgggcccgcgattaccggttttctgagcaccggacagcgtgagccgtgccagccctgtctcgccatcccagccgaggagggcagcgcgatggctcttccctgccttgaaatcaaccccattgccagccgctttcgccggcagagcattttccgtggggtccatccggctccaaggcggcctgcgctggccacgtggaaagaaacacgcccactgcctacaggccacgcccttcctcccttcgcgcatgcgccccacccgtcctgaggacctccgaacctgcagggggcgatgaaagtaggcttgcgctccgcttgtagctgcttccgggtcagaggtcagacggtctagcgctgcgtgggccatggtgcagctccgaccgcgagcgtctcgcgccccggcgtcggcggaggcgatggtggacgagggccagctggcctcggaggaggaggaggcggagcacgggctgttgctcgggcagcccagcagcggcgcggccgcagagcccctggaggaagacgacgaaggggacgatgagtttgacgatgaggccccggaggagctgactttcgccagcgcccaggcggaagcgagagaagaggagcggcgagtgcgggagaccgtgcgcagggataaaacgctcctgaaggagaagaggaagcgacgcgaggagctgttcatcgaacagaagaaaagaaaactccttccagacactattttggagaagttaaccacagcttcacagactaacatcaagaaatcgccaggaaaggtgaaagaagttaatttgcaaaagaaaaatgaagactgtgaaaaaggaaatgactccaagaaagttaaagtacaaaaagtacagtctgtcagccagaataaaagctacttggccgtaaggctaaaagaccaagatctgagagattcaaggcaacaagcagcacaagccttcatacataattcattatatgggccaggaaccaacaggactactgtaaataagttcctgtctcttgccaacaagaggttaccagtgaaaagagctgctgtccagtttttgaataatgcttggggaatccaaaaaaaacaaaatgccaagaggtttaaaagacggtggatggtcagaaagatgaaaactaagaagtaaatcaatgctaaatgaagaatctgtactttgtatgtatagaatttatctaataaatcattgttagatcattttaaaaaaaaaaaa

SEQ ID NO: 30 - DNA, 1498 bp, Homo sapiens
  CDS (162)..(815)
cgtatccggccggaattcccgggtcgacccacgcgtccgggaccttggagcgcgcgggccggcggcggcgcgagtggctcgggagcgcggctgacccccaggctgtggtgagggtctgagagctggtaccacggagcctgggcaacctcctccgcccacccatgcccaccccgcatgaggctgagaagcagatcacagggccagaggaggcggaccggcccccttcaatgtccagtcatgatacagcctctccagcggcccccagccgcaacccctgctgcctgtgctggtgctgctgctgtagctgctcctggaaccaagagcggcggcgcgcgtggcaggcctcccgggagagcaagctgcagcccctccccagctgtgaagtatgtgccacgccaagtcctgaggaggtgcagagctgggcgcagtcttttgacaagctgatgcacagcccagcgggacgcagcgtgttccgggcgttcctgcggacagagtacagcgaggagaacatgctcttctggttggcctgcgaggagctgaaggccgaggccaaccagcatgtggtagacgagaaggcgaggctcatctacgaggactacgtatccatcctgtcccccaaggaggtgagcctggactcccgtgtgcgggagggcatcaacaagaagatgcaggagccgtccgcacacacgttcgacgacgcgcagctgcagatctacacgctcatgcaccgggactcctacccccgcttcctcagctctcccacctaccgtgccctgctgctgcaggggccatcacagtcctcctccgaggcctaggccgccccccagcagcacagaccccgccgcctcctacggccgactctgggttcccttcagggtgttgttgtcggcagggctgtcagggcacatgcctggccggctggggtccccacccgcggagacggtcctagacccagtggggagtgctgtgtctcctgggtctgcccacccgtggccaagcaggaactccaggtgcagggcgggcctccaggtgcagggcgggccagaagccccctcatcggcccgcagctggctggcccagtgctcctggctgggggctcttgcgtggtgagagtaggggtccccccaggagccatgctggacccatgagcctcgctggggcctcctccccaggcagccaatgggccccagacaagcctttggtggggaacagaacctccgcatcgtgtagttttgtgacataaggagacctcctacttgagctgtctgtaccccagaatcaaacacagaacctcagaaccagatttaggacctcagaatcctgcactcaaggtggcaggacccaatttctgttttatatgttcatgaactttaaacctggaaacatgtccttactaggtgttttatcaaaaaaaagttttcatatttatctctatccctaaccccccaaaaataggatgtcttattattgaagatatttttaaagcaaaaaaaaaaaa

SEQ ID NO: 31 - DNA, 3692 bp, Homo sapiens
  CDS (582)..(3692)
agattatgaggaacaggcctcattattttaatacattttttttctaattataaaaactgccatcagagcaagaagatccatgaggacacatttctcttagtttgtttagcttacttgatgtttgctctgcaataacaccagctagcatgaggtaattcactgtaattagagctgccagtgacagttgggcaattcagagagaggcatttgtcaacaggttctactttagacaaggagagggagaaaaacgggcatctcctgcagggatggcttgcctgctcccaaatggagtaggcaaagttcgtcttcatcctcccattaccacattgggagctgctttccttgccttggctttagatcctttctgcgttctgcctcctggttaccccagaatgttccatgtggcctcatatcttcttctacgtttcccagtacaggcccagactttgagtctctctttaaatagaaggcagcataggcttcttctctaggccataaatctacgagtgagatccaaatctgtctcttcttctgttgtttttaacaatcattttcaagctgtgaaaaagggctcctatgacatggtgtcgactctgatcaaacataacactagcctagaccagccctgtgtcaagcgatggtcagcaatgcatgaagcagccaagcaaggccgaaaagatatcgtagctctgctgctgaaacatggaggcaatgtccacctgagagatggatttggagtcacaccactaggcgtcgctgccgagtatggtcactgtgacgtgttagaacatctaatccacaaaggtggtgatgtgcttgctttggcggatgatggggcgtcggtgctgtttgaggcagcaggaggtggcaatcccgactgcatttccctcctgctggaatatggaggaagcggaaatgtacctaaccgagcaggacatcttcctatacaccgagctgcctatgaggggcattatcttgcactgaaatatcttatcccagtaacatctaaaaatgcaattcggaaaagtgggctaacaccaattcactcagcagcagatggacaaaatgcacagtgtctagaactgctcattgaaaatggttttgatgtcaacactctacttgctgaccacatttcccagagctatgacgatgagaggaagactgcgctgtattttggcgtttctaataatgacgttcattgcacagaagtccttctggctgcaggtgcagacccaaacttagatcccctcaactgtctacttgttgcagtgagggccaataattatgaaattgtcaggctgcttctctcccatggagctaatgtcaattgttattttatgcatgtgaatgacactcgtttccccagtgtcattcaatatgctctaaacgacgaggtaatgctgaggctattgctgaataatggctatcaagtggagatgtgctttgactgcatgcatggtgacatctttggaaattcatttgtgtggtcagagatacaggaagaggtgctgccaggatggacatcttgtgtaataaaagataacccggacctggagtcttctaaagtgacagttgtcatgaccctgaggagggaaccataccaaggagatcgctgtcttgggtgctcaccttccacatcattcttcttaatactacagcgaacaactctgtccaaacttgtcagaccaacactcggggtttcaggacagagaaaaggcctttccagcgaagacctatttgaaacagctccttctgggtctgacaaagcagggaccatgtctacctttggctaccgaagaggactcagtaaatacgaatccatcgacgaggatgaactcctcgcctccctgtcagccgaggagctgaaggagctagagagagagttggaagacattgaacctgaccgcaaccttcccgtggggctaaggcaaaagagcctgacagagaaaacccccacagggacattcagcagagaggcactgatggcctattgggaaaaggagtcccaaaaactcttggagaaggagaggctgggggaatgtggaaagctgtctgtagttgccaggcatgatgagcaggaacttgctgatggagggtgcaaatccaattcccacaacagggaaaatcttcgagcagctgttgggtggctgggggagcaaggtagttgcgttgcagaagacaaagaggaaagtgaagaagagcttatctttactgaaagtaacagtgaggtttctgaggaagtgtatacagaggaggaggaggaggagtcccaggaggaagaggaggaagaagacagtgacgaagaggaaagaacaattgaaactgcaaaagggattaatggaactgtaaattatgatagtgtcaattctgacaactctaagccaaagatatttaaaagtcaaatagagaacataaatttgaccaatggcagcaatgggaggaacacagagtccccagctgccattcacccttgtggaaatcctacagtgattgaggacgctttggacaagattaaaagcaatgaccctgacaccacagaagtcaatttgaacaacattgagaacatcacaacacagacccttacccgctttgctgaagccctcaaggacaacactgtggtgaagacgttcagtctggccaacacgcatgccgacgacagtgcagccatggccattgcagagatgctcaaagtcaatgagcacatcaccaacgtaaacgtcgagtccaacttcataacgggaaaggggatcctggccatcatgagagctctccagcacaacacggtgctcacggagctgcgtttccataaccagaggcacatcatgggcagccaggtggaaatggagattgtcaagctgctgaaggagaacacgacgctgctgaggctgggataccattttgaactcccaggaccaagaatgagcatgacgagcattttgacaagaaatatggataaacagaggcaaaaacgtttgcaggagcaaaaacagcaggagggatacgatggaggacccaatcttaggaccaaagtctggcaaagaggaacacctagctcttcaccttatgtatctcccaggcactcaccctggtcatccccaaaactccccaaaaaagtccagactgtgaggagccgtcctctgtctcctgtggccacacctcctcctcctccccctcctcctcctcctccccctccttcttcccaaaggctgccaccacctcctcctcctccccctcctccactcccagagaaaaagctcattaccagaaacattgcagaagtcatcaaacaacaggagagtgcccaacgggcattacaaaatggacaaaaaaagaaaaaagggaaaaaggtcaagaaacagccaaacagtattctaaaggaaataaaaaattctctgaggtcagtgcaagagaagaaaatggaagacagttcccgaccttctaccccacagagatcagctcatgagaatctcatggaagcaattcggggaagcagcataaaacagctaaagcggatgacagaagtgccctgtgatgaccaaatgctcgggcaatgtagggtgactgccgccaatgagccaaaatacaatcacatgcatcagagtcagaggctggctcctcaaaacaagccagcttttctggttagagatggacataggatgttggcggcatctatcaacacccagatgatatga

SEQ ID NO: 32 - DNA, 3572 bp, Homo sapiens
  CDS (582)..(3572)
agattatgaggaacaggcctcattattttaatacattttttttctaattataaaaactgccatcagagcaagaagatccatgaggacacatttctcttagtttgtttagcttacttgatgtttgctctgcaataacaccagctagcatgaggtaattcactgtaattagagctgccagtgacagttgggcaattcagagagaggcatttgtcaacaggttctactttagacaaggagagggagaaaaacgggcatctcctgcagggatggcttgcctgctcccaaatggagtaggcaaagttcgtcttcatcctcccattaccacattgggagctgctttccttgccttggctttagatcctttctgcgttctgcctcctggttaccccagaatgttccatgtggcctcatatcttcttctacgtttcccagtacaggcccagactttgagtctctctttaaatagaaggcagcataggcttcttctctaggccataaatctacgagtgagatccaaatctgtctcttcttctgttgtttttaacaatcattttcaagctgtgaaaaagggctcctatgacatggtgtcgactctgatcaaacataacactagcctagaccagccctgtgtcaagcgatggtcagcaatgcatgaagcagccaagcaaggccgaaaagatatcgtagctctgctgctgaaacatggaggcaatgtccacctgagagatggatttggagtcacaccactaggcgtcgctgccgagtatggtcactgtgacgtgttagaacatctaatccacaaaggtggtgatgtgcttgctttggcggatgatggggcgtcggtgctgtttgaggcagcaggaggtggcaatcccgactgcatttccctcctgctggaatatggaggaagcggaaatgtacctaaccgagcaggacatcttcctatacaccgagctgcctatgaggggcattatcttgcactgaaatatcttatcccagtaacatctaaaaatgcaattcggaaaagtgggctaacaccaattcactcagcagcagatggacaaaatgcacagtgtctagaactgctcattgaaaatggttttgatgtcaacactctacttgctgaccacatttcccagagctatgacgatgagaggaagactgcgctgtattttggcgtttctaataatgacgttcattgcacagaagtccttctggctgcaggtgcagacccaaacttagatcccctcaactgtctacttgttgcagtgagggccaataattatgaaattgtcaggctgcttctctcccatggagctaatgtcaattgttattttatgcatgtgaatgacactcgtttccccagtgtcattcaatatgctctaaacgacgaggtaatgctgaggctattgctgaataatggctatcaagtggagatgtgctttgactgcatgcatggtgacatctttggaaattcatttgtgtggtcagagatacaggaagaggtgctgccaggatggacatcttgtgtaataaaagataacccggacctggagtcttctaaagtgacagttgtcatgaccctgaggagggaaccataccaaggagatcgctgtcttgggtgctcaccttccacatcattcttcttaatactacagcgaacaactctgtccaaacttgtcagaccaacactcggggtttcaggacagagaaaaggcctttccagcgaagacctatttgaaacagctccttctgggtctgacaaagcagggaccatgtctacctttggctaccgaagaggactcagtaaatacgaatccatcgacgaggatgaactcctcgcctccctgtcagccgaggagctgaaggagctagagagagagttggaagacattgaacctgaccgcaaccttcccgtggggctaaggcaaaagagcctgacagagaaaacccccacagggacattcagcagagaggcactgatggcctattgggaaaaggagtcccaaaaactcttggagaaggagaggctgggggaatgtggaaaggttgcagaagacaaagaggaaagtgaagaagagcttatctttactgaaagtaacagtgaggtttctgaggaagtgtatacagaggaggaggaggaggagtcccaggaggaagaggaggaagaagacagtgacgaagaggaaagaacaattgaaactgcaaaagggattaatggaactgtaaattatgatagtgtcaattctgacaactctaagccaaagatatttaaaagtcaaatagagaacataaatttgaccaatggcagcaatgggaggaacacagagtccccagctgccattcacccttgtggaaatcctacagtgattgaggacgctttggacaagattaaaagcaatgaccctgacaccacagaagtcaatttgaacaacattgagaacatcacaacacagacccttacccgctttgctgaagccctcaaggacaacactgtggtgaagacgttcagtctggccaacacgcatgccgacgacagtgcagccatggccattgcagagatgctcaaagtcaatgagcacatcaccaacgtaaacgtcgagtccaacttcataacgggaaaggggatcctggccatcatgagagctctccagcacaacacggtgctcacggagctgcgtttccataaccagaggcacatcatgggcagccaggtggaaatggagattgtcaagctgctgaaggagaacacgacgctgctgaggctgggataccattttgaactcccaggaccaagaatgagcatgacgagcattttgacaagaaatatggataaacagaggcaaaaacgtttgcaggagcaaaaacagcaggagggatacgatggaggacccaatcttaggaccaaagtctggcaaagaggaacacctagctcttcaccttatgtatctcccaggcactcaccctggtcatccccaaaactccccaaaaaagtccagactgtgaggagccgtcctctgtctcctgtggccacacctcctcctcctccccctcctcctcctcctccccctccttcttcccaaaggctgccaccacctcctcctcctccccctcctccactcccagagaaaaagctcattaccagaaacattgcagaagtcatcaaacaacaggagagtgcccaacgggcattacaaaatggacaaaaaaagaaaaaagggaaaaaggtcaagaaacagccaaacagtattctaaaggaaataaaaaattctctgaggtcagtgcaagagaagaaaatggaagacagttcccgaccttctaccccacagagatcagctcatgagaatctcatggaagcaattcggggaagcagcataaaacagctaaagcggatgacagaagtgccctgtgatgaccaaatgctcgggcaatgtagggtgactgccgccaatgagccaaaatacaatcacatgcatcagagtcagaggctggctcctcaaaacaagccagcttttctggttagagatggacataggatgttggcggcatctatcaacacccagatgatatga

SEQ ID NO: 33 - DNA, 2261 bp, Homo sapiens
  CDS (509)..(1585)
attcccgtgtcgacccacgcgtccgcgcgttcccggcagctgcgggctccgaggccagagagaaaagactgcgaggtggccgcagctgtggccggagaggtgggagtcggagcgaggccctctcgggggagcagggtgaacgccggccactctaggatcctcactcggggagaggaggcatagctcgcggtgtcacctccagccgcaacgtactccgggtcggccttgcgctcggggcctgagaggggcggcggcggggtcaggggccgcacaaagaatgaaccagcagtggaagagaaaatactgtaagctggctgactgctggtgaagaaaatgctttatttttgtggcaggcatctgtgggatctgtaatagaaatgggatcttcaatattcatgttattttctcctttggtcttatatgattgttacctttatgaagctttagtgattacaaagcactttttttgtccatttttacctgagctttgtaaactctgatttgcaggatggctggctgtggtgaaattgatcattcaataaacatgcttcctacaaacaggaaagcgaacgagtcctgttctaatactgcaccttctttaaccgtccctgaatgtgccatttgtctgcaaacatgtgttcatccagtcagtctgccctgtaagcacgttttctgctatctatgtgtaaaaggagcttcatggcttggaaagcggtgtgctctttgtcgacaagaaattcccgaggatttccttgacaagccaaccttgttgtcaccagaagaactcaaggcagcaagtagaggaaatggtgaatatgcatggtattatgaaggaagaaatgggtggtggcagtacgatgagcgcactagtagagagctggaagatgctttttccaaaggtaaaaagaacactgaaatgttaattgctggctttctgtatgtcgctgatcttgaaaacatggttcaatataggagaaatgaacatggacgtcgcaggaagattaagcgagatataatagatataccaaagaagggagtagctggacttaggctagactgtgatgctaataccgtaaacctagcaagagagagctctgctgacggagcggacagtgtatcagcacagagtggagcttctgttcagcccctagtgtcttctgtaaggcccctaacatcagtagatggtcagttaacaagccctgcaacaccatcccctgatgcaagcacttctctggaagactcttttgctcatttacaactcagtggagacaacacagctgaaaggagtcataggggagaaggagaagaagatcatgaatcaccatcttcaggcagggtaccagcaccagacacctccattgaagaaactgaatcagatgccagtagtgatagtgaggatgtatctgcagttgttgcacagcactccttgacccaacagagacttttggtttctaatgcaaaccagacagtacccgatcgatcagatcgatcgggaactgatcgatcagtagcagggggtggaacagtgagtgtcagtgtcagatctagaaggcctgatggacagtgcacagtaactgaagtttaaataaaaatgtcttcagctccatgctcaaggttgaaagggttacctgtaaatttctgcccacataacattatactcatccctagtagtgcattttgggagttggggtgggaaggggtatgggaaggatagactcataattaaaatgtctaacatgtctctgttgagaaatttatttaatgtaaggaacttgggtgttaatagttgagagctgtttagtaataacccagttttcttgaggtctgtttactttatactttttaaaaacttctgtagttcttttggccagtgtgtttgtattatctgtgcattaatggtcctcatctgactcctgcattgtgtcttatttttctgcatggattggcataagaccattactaaaatttggcacctgtgagatgtttgatattatgaacaggaaacataatttaatgtatgaatagatgtgaatttgggatttcaaaatagatgaataacaactattttatagtaaagttattgaaatggaaatgaaaacagccagtaacttatgtttcagaatgtttgtaacacacttcatggtgttcccataggctttgctgtctagtcttatagtttgaggtttttttggtctgcatttttctttttgattacaaaatttataatttaataaatactagagtttatcaaaaaaaaaaaa

SEQ ID NO: 34 - DNA, 2356 bp, Homo sapiens
  CDS (85)..(1554)
gcacgaggcggcgccgaagaggcgactgaggccggacggggcggacggcgacgcagcccgcggcagaagtttgaaattggcacaatggaagaagctggaatttgtgggctaggggtgaaagcagatatgttgtgtaactctcaatcaaatgatattcttcaacatcaaggctcaaattgtggtggcacaagtaacaagcattcattggaagaggatgaaggcagtgactttataacagagaacaggaatttggtgagcccagcatactgcacgcaagaatcaagagaggaaatccctgggggagaagctcgaacagatccccctgatggtcagcaagattcagagtgcaacaggaacaaagaaaaaactttaggaaaagaagttttattactgatgcaagccctaaacaccctttcaaccccagaggagaagctggcagctctctgtaagaaatatgctgatcttctggaggagagcaggagtgttcagaagcaaatgaagatcctgcagaagaagcaagcccagattgtgaaagagaaagttcacttgcagagtgaacatagcaaggctatcttggcaagaagcaagctagaatctctttgcagagaacttcagcgtcacaataagacgttaaaggaggaaaatatgcagcaggcacgagaggaagaagaacgacgtaaagaagcaactgcacatttccagattaccttaaatgaaattcaagcccagctggagcagcatgacatccacaacgccaaactccgacaggaaaacattgagctgggggagaagctaaagaagctcatcgaacagtacgcactgagggaagagcacattgataaggtgttcaaacataaggaactgcaacagcagctcgtggatgccaaactgcagcaaacgacacaactgataaaagaagctgatgaaaaacatcagagagagagagagtttttattaaaagaagcgacagaatcgaggcacaaatacgaacaaatgaaacagcaagaagtacaactaaaacagcagctttctctttatatggataagtttgaagaattccagactaccatggcaaaaagcaatgaactgtttacaaccttcagacaggaaatggaaaagatgacaaagaaaattaaaaaactggaaaaagaaacaataatttggcgtaccaaatgggaaaacaataataaagcacttctgcaaatggctgaagagaaaacagtccgtgataaagagtacaaggcccttcaaataaaactggaacggttagagaagctgtgcagggctcttcaaacagaaaggaatgagctcaatgagaaggtggaagtcctgaaagagcaggtatccatcaaagcggccatcaaagcggcgaacagggatttagcaacacctgtgatgcagccctgtactgccctggattctcacaaggagctgaacacttcctcgaaaagagccctgggagcgcacctggaggctgagcccaagagtcagagaagcgctgtgcaaaagcccccgtccacaggctctgctccggccatcgagtcggttgactaagatgaggtgtgatcactgtattgagagatatattttgtgtataactttctctgttagtagttaactattggttttgtggtgaaaattttcttactttttctaccatatctgtattttcttagaactactggacttatgtggtacaggaggctgcttagcagttttgaatagtttaatctataaattttcctcagctgtgttgcacatcagcctcgttctccctccactggaatgcatgtgttcattgccttgtcctttctctccctgctccttgcacattatcatcctaatgaaaatttcactgacagggccgaccattacaagggaactttgttctgacgatggttccttgatgtgaaaacaatattaatttaaacgtcttagcccccccccccataatattattcagaaaaacaaaataccaaggcgattagttttgtctaataacccatttaaatgccaagtaaaaataaaactcctagtgttgggtcagaagcatatttgattgaaattagctttttgaaaacatttatatctcgggacaaattgagatggccacatgcctagaatcctaagtttcggcagaatatgtatataaagatgtcacttgtggacaaaatagtacatagaggcaaatcactagacaaataagcttagtgtttacgtgactgaacagtcatcctgctttggtttcaggtgtgggatttggaccatgaggggctcccgtaaaggatggcggtttgtgtttgattctgatttgggatttcagtacatattctccacttcccatagaaggccactt

SEQ ID NO: 35 - DNA, 2714 bp, Homo sapiens
  CDS (265)..(2574)
gaatcgagcccgacgtcgcatgctcccggccgccatggccgcgggattcccgggtcgacgatttcgtcgggaggaatggaaggagaaggcggaatgtgggagggctcagggggatgtgggagggacgaacggagaagggggagagaggggggtccagtctcccctggccgagcattttttttttggaagtcctaggactgatctccaggaccagcactcttctcccagcccttagggtcctgctcggccaaggccttccctgccatgcgacctgtcagtgtctggcagtggagcccctgggggctgctgctgtgcctgctgtgcagttcgtgcttggggtctccgtccccttccacgggccctgagaagaaggccgggagccaggggcttcggttccggctggctggcttccccaggaagccctacgagggccgcgtggagatacagcgagctggtgaatggggcaccatctgcgatgatgacttcacgctgcaggctgcccacatcctctgccgggagctgggcttcacagaggccacaggctggacccacagtgccaaatatggccctggaacaggccgcatctggctggacaacttgagctgcagtgggaccgagcagagtgtgactgaatgtgcctcccggggctgggggaacagtgactgtacgcacgatgaggatgctggggtcatctgcaaagaccagcgcctccctggcttctcggactccaatgtcattgaggtagagcatcacctgcaagtggaggaggtgcgaattcgacccgccgttgggtggggcagacgacccctgcccgtgacggaggggctggtggaagtcaggcttcctgacggctggtcgcaagtgtgcgacaaaggctggagcgcccacaacagccacgtggtctgcgggatgctgggcttccccagcgaaaagagggtcaacgcggccttctacagaaagttgaggaagcgagcggccaaggtctcagcccgacaccccaagccccttggaaggctgctagcccaacggcagcaacactcctttggtctgcatggggtggcgtgcgtgggcacggaggcccacctctccctctgttccctggagttctatcgtgccaatgacaccgccaggtgccctggggggggccctgcagtggtgagctgtgtgccaggccctgtctacgcggcatccagtggccagaagaagcaacaacagtcgaagcctcagggggaggcccgtgtccgtctaaagggcggcgcccaccctggagagggccgggtagaagtcctgaaggccagcacatggggcacagtctgtgaccgcaagtgggacctgcatgcagccagcgtggtgtgtcgggagctgggcttcgggagtgctcgagaagctctgagtggcgctcgcatggggcagggcatgggtgctatccacctgagtgaagttcgctgctctggacaggagctctccctctggaagtgcccccacaagaacatcacagctgaggattgttcacatagccaggatgccggggtccggtgcaacctaccttacactggggcagagaccaggatccgactcagtgggggccgcagccaacatgaggggcgagtcgaggtgcaaatagggggacctgggccccttcgctggggcctcatctgtggggatgactgggggaccctggaggccatggtggcctgtaggcaactgggtctgggctacgccaaccacggcctgcaggagacctggtactgggactctgggaatataacagaggtggtgatgagtggagtgcgctgcacagggactgagctgtccctggatcagtgtgcccatcatggcacccacatcacctgcaagaggacagggacccgcttcactgctggagtcatctgttctgagactgcatcagatctgttgctgcactcagcactggtgcaggagaccgcctacatcgaagaccggcccctgcatatgttgtactgtgctgcggaagagaactgcctggccagctcagcccgctcagccaactggccctatggtcaccggcgtctgctccgattctcctcccagatccacaacctgggacgagctgacttcaggcccaaggctgggcgccactcctgggtgtggcacgagtgccatgggcattaccacagcatggacatcttcactcactatgatatcctcaccccaaatggcaccaaggtggctgagggccacaaagctagtttctgtctcgaagacactgagtgtcaggaggatgtctccaagcggtatgagtgtgccaactttggagagcaaggcatcactgtgggttgctgggatctctaccggcatgacattgactgtcagtggattgacatcacggatgtgaagccaggaaactacattctccaggttgtcatcaacccaaactttgaagtagcagagagtgactttaccaacaatgcaatgaaatgtaactgcaaatatgatggacatagaatctgggtgcacaactgccacattggtgatgccttcagtgaagaggcccacaggaggtttgaacgctcccctggccagaccagcacctagattatgtaagtgccactgccctttgcaaaccgcccctggcgcctaatggcaggggtctgaggctgccattacctcaggagcttatcaagaaacccatgtcagcaaccatgtattgcggccgctctagaggaatcgccagc

SEQ ID NO: 36 - DNA, 1452 bp, Homo sapiens
  CDS (115)..(639)
  misc_feature (1)...(1452): n = a,t,c or g
taagcttgcggccgcgccggctccaggaaatggctactgctgacaggaagtttggcatccacctcccccagcctcctgagtggacaggggccctgggcaccacttcagagggccatgaagcccccaggaggagaatcgagcaatctttttggaagtccagaagaagctactccttccagcaggcctaataggatggcatctaatatttttggaccaacagaagaacctcagaacatacccaagaggacaaatcccccagggggtaaaggaagtggtatctttgacgaatcaacccccgtgcagactcgacagcacctgaacccacctggagggaagaccagcgacatttttgggtctccggtcactgccacttcacgcttggcacacccaaacaaacccaaggatcatgttttcttatgtgaaggagaagaaccaaaatcggatcttaaagctgcaaggagcatcccggctggagcagagccaggtgagaaaggcagcgccagaaaagcaggccccgccaaggagcaggagcccatgcccacagtcgacagccatgagccccggctggggccgcgggctcgctctcacaacaaggtcctgaacccaccgggaggcaaatccagcatctccttctactaagagaagccactgctccacccggagccagaccagaaactcaagagatagggtagccatgttttcatttccttttgcccaaatgagcggggtgggaagagggttagtcttatgtgagcctggctgctcagcgtctcctggccgtcatgacagctgcttggagacccgtgccttccagatggctgggagatgcctctgtggggatgaaatggggcacccctggccatcactcatgtgtagtccaggtttgagaggaactggaaggggggtgagggtgggggagtgcncnnnncatnncnctcctctctccctccttccttcttttgcttcccttgtctcgctttctcttcccactctcctgttctctgctctgtggatgggggctgcgtcgctgctcctccgcgtttaattgccttttgttctcctcgtcctttggtgacccggttgcttttcgacttccacttcattaactccacctattgcttgagtagtctattatatactgtagttgtctcggctctcctacacatatcatatatagcattggcgaatctggcttcggtctatcattctaggtgatacatttctatatctatcctctcctggtgctgaatcgtccgacaccatatcaaattcgaacttagtaatgatctgcctatgtactcatacttactcttcacctcgccgtctcctcatacttatctcgctctttatccgattctgtcgtgatcactatcgcacatctcgttactgtccatcttatagattacttcatcctcagactagacttattcgtcaatacacaacatcatcact

SEQ ID NO: 37 - DNA, 495 bp, Homo sapiens
  CDS (74)..(469)
gaaatcatgctgtggcacgcccggaatccgggtcgaccccgcgtccgggcaacgctgcggccccgcccacgtcatggcgcccgaggagaacgcggggaccgaactcttgctgcagagtttggagcgccgcttcctggcggcgcgtgcactgcgctccttaccctggcagagcttagaagcaaagttaagagactcatcagattctgagctgctgcgggatattttgcagaagacgtgctgtatagcccagaagccatcgtgtcgctggtcggggtcctgcggaggctggctgcctaccaggagcaccagcgggctcctcaagtctatgtggcccttaccgtctgcaacccagagacgtgccagctgttcaccactgagctatgccgggctgggatcagatgggaagtggaacctcgtcatgaccagaaactgtttccctacgaagagcacttggagatggcaatgctgaacctcacactgtaggactcacatacc

SEQ ID NO: 38 - DNA, 923 bp, Homo sapiens
  CDS (515)..(694)
atagaaaaccttgaggtaccggtccggaattcccgggtcgacccacgcgtccgctgagttatgaacagtgtgtgaattttgagtgattcgtggctttggttgtgagattcaattgtctcccttcagaataggaaccaatgggcagaaaaggaacaatcgtggtgcatgtggtatagtggggtaagaacagctctccagctccctcacttacccatcctgtgttctggggttaattttcatgagctgcaggctcatgtgtaaaaatcttccttcccatggtgtatatgaagtgagttttgtgtctaaattcttagtgagtgctgaataaatatgtattttttctgtattttaacagccaagactatttaagaatagaaagtcctaaatattaaaattcttaactttgagtgcttataacggcctttctccatgttagcctacttaatcctgaatagccttgttttacaaatgtggaaaccacactttagagaagcagcatgctcaaatcacatagatggtaggtgggaaggtaggcttgtttttcaacactgtaagatcttgggcagccataaaaaagaatgagttcatgtcctttgcagggacatggctgaagctggaagctatcattctaagcaaactaatacaggaagagaaaaccaaacaccacatgttctcactcataagtgggagttgaacaatgagaacacatggacacacggaggggaaaatcacatactggggcctctcgatgggtggaggacaaggggaagaagactattaggacaaatacctaatgcatgcggggcttaaaatgtagatgatgggtcaataggcgcatcaaaccaccatgacacatgtacacctatataacaaacctgcatgttctgctcgtgtatcccagaagttaaagtaaaaaaaaaaaa

SEQ ID NO: 39 - DNA, 1477 bp, Homo sapiens
  CDS (180)..(1157)
aaggatccttaattaaattaatcccccccccccccttcctcctcctcctccttggcatccgcctcttcttcctcctgcgtcctcccccgctgcctccgctgctcccgacgcggagcccggagcccgcgccgagcccctggcctcgcggtgccatgctgccccggcggcggcgctgaaggatggcgacgccgctgcctccgccctccccgcggcacctgcggctgctgcggctgctgctctccggcctcgtcctcggcgccgccctgcgtggagccgccgccggccacccggatgtagccgcctgtcccgggagcctggactgtgccctgaagaggcgggcaaggtgtcctcctggtgcacatgcctgtgggccctgccttcagcccttccaggaggaccagcaagggctctgtgtgcccaggatgcgccggcctccaggcgggggccggccccagcccagactggaagatgagattgacttcctggcccaggagcttgcccggaaggagtctggacactcaactccgcccctacccaaggaccgacagcggctcccggagcctgccaccctgggcttctcggcacgggggcaggggctggagctgggcctcccctccactccaggaacccccacgcccacgccccacacctccctgggctcccctgtgtcatccgacccggtgcacatgtcgcccctggagccccggggagggcaaggcgacggcctcgcccttgtgctgatcctggcgttctgtgtggccggtgcagccgccctctccgtagcctccctctgctggtgcaggctgcagcgtgagatccgcctgactcagaaggccgactacgccactgcgaaggcccctggctcacctgcagctccccggatctcgcctggggaccagcggctggcacagagcgcggagatgtaccactaccagcaccaacggcaacagatgctgtgcctggagcggcataaagagccacccaaggagctggacacggcctcctcggatgaggagaatgaggacggagacttcacggtgtacgagtgcccgggcctggccccgaccggggaaatggaggtgcgcaaccctctgttcgaccacgccgcactgtccgcgcccctgccggcccccagctcaccgcctgcactgccatgacctggaggcagacagacgcccacctgctccccgacctcgaggcccccggggaggggcagggcctggagcttcccactaaaaacatgttttgatgctgtgtgcttttggctgggcctcgggctccaggccctgggaccccttgccagggagacccccgaacctttgtgccaggacacctcctggtcccctgcacctctcctgttcggtttagacccccaaactggagggggcatggagaaccgtagagcgcaggaacgggtgggtaattctagagacaaaagccaattaaagtccatttcagacctgcggaaaaaaaaaaa

SEQ ID NO: 40 - DNA, 4119 bp, Homo sapiens
  CDS (1)..(4119)
atggatgagagtacctttgcaggaggccaggaatatggtggatgggtcccagaacaccacaaaagtaacgaacccaagagtggacacattgaaaaaggtaacacagatcagtgccaagaaagaacccctcaacccatgatttatcccacaggggaaattgagagcacagtgaatgcctggatgctcagccatgagaaagaacaaagtcaaatccttttgatatcgaattgccttgacgctttaaagcaccggagctgtgattatggtctgaaaatagctcttgacataaaacacagattaaagattcagcccaagatatttatctatacaaggacacataaatatgcagtcaccctccacatgcttgctcataccattacctcagaaagagatgacatagaggaatggttaaatgcatgggtagtagaccagtgctgtccaccagaaatgtctgtgatgatggaaatgttctatatttatgctgtccactatgggagatcacttctttcttggagtcaggaggaggagaaggagaagggaggcagggaggaggaggaggaggaggaggaggaggaggaggaggaggaggaggaggaggaggaggaggaggaggaggaggaggaggaggcagaagaagagaaattaggggaggcagctgtcccggagggtgtccagctcggatggctgactgctctttcacttgtcgttaacttccacccagtagtcttagtctccccttggacatggtaccgaccgtgtgccattcttatttcacttgaccgagcccgagctgcagcccagggtggaagccgcaagggctgggcagagttccaggcaagagggaccgagaggcgtgagcagtgctccgcagcgcttgtcagagaaatggagcagcggctcctttgtgggctcttacatccccgtcctgggtgcacagcccggatatttgatctaagcgttgcccgttggctagctgctcggtggggatctgcctgccctgggggcgccgcccgcgctccccgcggtgctctcgctcctgggctgcgccagtccgaggcggtgccggctcctttgcctccccgagtcgcagatgctgcgggcgcctccgggaaaagatctgggcggcgcgctcgctcgtgcccaagtcccatggcgagggcagcccgagtggccgtcgcggctgtaggtccgcatgccgggcaccgcaccaggcgtctagcaggtaggggcagggaaggtagggctgcgctggcggccggtgcccagttaccggcgatcggggacgctcggagacacctggtctcccggaagcgcccttcggaaatgggattcgacccggcttgcgggcggcgggtgtttagaagaagaggctgcgggcaagcagtgccccctctctggttccccggactcctcttagccccctcgtggcctgatgggcggccgggacggagagctcatctcaagtttgcccttctctatggagaaggaaaatttgagtctccagaaggaaagtattttgctaaacgccaagcaagaattagaggatggacacaggaagatccagaagctagtggcacatctagcaacagagccagatcagaacccagtgtgttaaccgtggccgggatcttacagacagagagtcgcaaaactgccaaagacatttgcaagatccgctgtctgtgcgaagaaaaggaaaacgtactgaatatcaactgtgagaacaaaggatttacaacagttagcctgctccagcccccccagtatcgaatctatcagctttttctcaatggaaacctcttgacaagactgtatccaaacgaatttgtcaattactccaacgcggtgactcttcacctaggtaacaacgggttacaggagatccgaacgggggcattcagtggcctgaaaactctcaaaagactgcatctcaacaacaacaagcttgagatattgagggaggacaccttcctaggcctggagagcctggagtatctccaggccgactacaattacatcagtgccatcgaggctggggcattcagcaaacttaacaagctcaaagtgctcatcctgaatgacaaccttctgctttcactgcccagcaatgtgttccgctttgtcctgctgacccacttagacctcagggggaataggctaaaagtaatgccttttgctggcgtccttgaacatattggagggatcatggagattcagctggaggaaaatccatggaattgcacttgtgacttacttcctctcaaggcctggctagacaccataactgtttttgtgggagagattgtctgtgagactccctttaggttgcatgggaaagacgtgacccagctgaccaggcaagacctctgtcccagaaaaagtgccagtgattccagtcagaggggcagccatgctgacacccacgtccaaaggctgtcacctacaatgaatcctgctctcaacccaaccagggctccgaaagccagccggccgcccaaaatgagaaatcgtccaactcctcgagtgactgtgtcaaaggacaggcaaagttttggacccatcatggtgtaccagaccaagtctcctgtgcctctcacctgtcccagcagctgtgtctgcacctctcagagctcagacaatggtctgaatgtaaactgccaagaaaggaagttcactaatatctctgacctgcagcccaaaccgaccagtccaaagaaactctacctaacagggaactatcttcaaactgtctataagaatgacctcttagaatacagttctttggacttactgcacttaggaaacaacaggattgcagtcattcaggaaggtgcctttacaaacctgaccagtttacgcagactttatctgaatggcaattaccttgaagtgctgtacccttctatgtttgatggactgcagagcttgcaatatctctatttagagtataatgtcattaaggaaattaagcctctgacctttgatgctttgattaacctacagctactgtttctgaacaacaaccttcttcggtccttacctgataatatatttggggggacggccctaaccaggctgaatctgagaaacaaccatttttctcacctgcccgtgaaaggggttctggatcagctcccggctttcatccagatagatctgcaggagaacccctgggactgtacctgtgacatcatggggctgaaagactggacagaacatgccaattcccctgtcatcattaatgaggtgacttgcgaatctcctgctaagcatgcaggggagatactaaaatttctggggagggaggctatctgtccagacagcccaaacttgtcagatggaaccgtcttgtcaatgaatcacaatacagacacacctcggtcgcttagtgtgtctcctagttcctatcctgaactacacactgaagttccactgtctgtcttaattctgggattgcttgttgttttcatcttatctgtctgttttggggctggtttattcgtctttgtcttgaaacgccgaaagggagtgccgagcgttcccaggaataccaacaacttagacgtaagctcctttcaattacagtatgggtcttacaacactgagactcacgataaaacagacggccatgtctacaactatatccccccacctgtgggtcagatgtgccaaaaccccatctacatgcagaaggaaggagacccagtagcctattaccgaaacctgcaagagttcagctatagcaacctggaggagaaaaaagaagagccagccacacctgcttacacaataagtgccactgagctgctagaaaagcaggccacaccaagagagcctgagctgctgtatcaaaatattgctgagcgagtcaaggaacttcccagcgcaggcctagtccactataacttttgtaccttacctaaaaggcagtttgccccttcctatgaatctcgacgccaaaaccaagacagaatcaataaaaccgttttatatggaactcccaggaaatgctttgtggggcagtcaaaacccaaccaccctttactgcaagctaagccgcaatcagaaccggactacctcgaagttctggaaaaacaaactgcaatcagtcagctgtga

SEQ ID NO: 41 - DNA, 617 bp, Homo sapiens
  CDS (106)..(501)
tatctgttgatgactgattacgaatttaatacgactgcactatagggaatttggccctcgaggccaagaattcggcacgagccacagactcagagagaacccaccatggtgctgtctcctgccgacaagaccaacgtcaaggccgcctggggtaaggtcggcgcgcacgctggcgagtatggtgcggaggccctggagaggatgttcctgtccttccccaccaccaagacctacttcccgcacttcgacctgagccacggctctgcccaggttaagggccacggcaagaaggtggccgacatgcccaacgcgctgtccgccctgagcgacctgcacgcgcacaagcttcgggtggacccggtcaacttcaagctcctaagccactgcctgctggtgaccctggccgcccacctccccgccgagttcacccctgcggtgcacgcctccctggacaagttcctggcttctgtgagcaccgtgctgacctccaaataccgttaagctggagcctcggtggccatgcttcttgccccttgggcctccccccagcccctcctccccttcctgcacccgtacccccgtggtctttgaataaagtctgagtgggcggcaaaaaa

SEQ ID NO: 42 - DNA, 1613 bp, Homo sapiens
  CDS (248)..(1468)
tttgaattcgtatagcgagacccaagctggctagcgtttaaacttaagcttggtaccgagctcggatccactagtccagtgtggtggaattccgccgctggagcccgggtcgagaggacgaggtgccgctgcctggagaatcctccgctgccgtcggctcccggagcccagccctttcctaacccaacccaacctagcccagtcccagccgccagcgcctgtccctgtcacggaccccagcgttaccatgcatcctgccgtcttcctatccttacccgacctcagatgctcccttctgctcctggtaacttgggtttttactcctgtaacaactgaaataacaagtcttgatacagagaatatagatgaaattttaaacaatgctgatgttgctttagtaaatttttatgctgactggtgtcgtttcagtcagatgttgcatccaatttttgaggaagcttccgatgtcattaaggaagaatttccaaatgaaaatcaagtagtgtttgccagagttgattgtgatcagcactctgacatagcccagagatacaggataagcaaatacccaaccctcaaattgtttcgtaatgggatgatgatgaagagagaatacaggggtcagcgatcagtgaaagcattggcagattacatcaggcaacaaaaaagtgaccccattcaagaaattcgggacttagcagaaatcaccactcttgatcgcagcaaaagaaatatcattggatattttgagcaaaaggactcggacaactatagagtttttgaacgagtagcgaatattttgcatgatgactgtgcctttctttctgcatttggggatgtttcaaaaccggaaagatatagtggcgacaacataatctacaaaccaccagggcattctgctccggatatggtgtacttgggagctatgacaaattttgatgtgacttacaattggattcaagataaatgtgttcctcttgtccgagaaataacatttgaaaatggagaggaattgacagaagaaggactgccttttctcatactctttcacatgaaagaagatacagaaagtttagaaatattccagaatgaagtagctcggcaattaataagtgaaaaaggtacaataaactttttacatgccgattgtgacaaatttagacatcctcttctgcacatacagaaaactccagcagattgtcctgtaatcgctattgacagctttaggcatatgtatgtgtttggagacttcaaagatgtattaattcctggaaaactcaagcaattcgtatttgacttacattctggaaaactgcacagagaattccatcatggacctgacccaactgatacagccccaggagagcaagcccaagatgtagcaagcagtccacctgagagctccttccagaaactagcacccagtgaatataggtatactctattgagggatcgagatgagctttaaaaacttgaaaaacagtttgtaagcctttcaacagcagcatcaacctacgtggtggaaatagtaaacctatattttcataattctatgtgtatttttattttgaataaacagaaagaaattttgggtttttaaaaaaaaaaaaaaa

SEQ ID NO: 43 - DNA, 1068 bp, Homo sapiens
  CDS (154)..(894)
atttggccctcgaggccaagaattcggcacgagctggaagaaacgcggctggtaccccggaagcagtcgctgcaacttccgggaggtgcttgtgtgcctggtgcgggagctacggggcccagggattgtgtttaaagtagtgcttctaccaacatgtcccgtggttccagcgccggttttgaccgccacattaccattttttcacccgagggtcggctctaccaagtagaatatgcttttaaggctattaaccagggtggccttacatcagtagctgtcagagggaaagactgtgcagtaattgtcacacagaagaaagtacctgacaaattattggattccagcacagtgactcacttattcaagataactgaaaacattggttgtgtgatgaccggaatgacagctgacagcagatcccaggtacagagggcacgctatgaggcagctaactggaaatacaagtatggctatgagattcctgtggacatgctgtgtaaaagaattgccgatatttctcaggtctacacacagaatgctgaaatgaggcctcttggttgttgtatgattttaattggtatagatgaagagcaaggccctcaggtatataagtgtgatcctgcaggttactactgtgggtttaaagccactgcagcgggagttaaacaaactgagtcaaccagcttccttgaaaaaaaagtgaagaagaaatttgattggacatttgaacagacagtggaaactgcaattacatgcctgtctactgttctatcaattgatttcaaaccttcagaaatagaagttggagtagtgacagttgaaaatcctaaattcaggattcttacagaagcagagattgatgctcaccttgttgctctagcagagagagactaaacattgtcgttagtttaccagatccgtgatgccacttacctgtgtgtttggtaacaacaaaccaacatcatggaggtccctggattgaaaaaggagcctctcccactcctcctaccaccgaagtggttaggactctatataaataaaaacaaggcttttggaaaaaaaaaaaaa

SEQ ID NO: 44 - DNA, 2173 bp, Homo sapiens
  CDS (311)..(2146)
acttgtgttttggaacagctgcagccggcgctgggcccgcctggaatgcgggaacaggctgcacaccaggacttttatggaaacttgctgctggagacggcggcggcggcggcggcagcggcagccataggactcccagcggctggagcagaagtgttagcggacagagctcccagacccctacccacagccaggcgggacgcgcacagtccctccacgcggaaagaagtaccttcgccggtcaccggctcctgcagggtgcaaatatatacagagcttcataatcagcccaagaccacatagagcaaacatgaatgatatttcccaaaaggctgagattaaagaaatgcttgcttctgatgatgaggaagatgtatcttctaaagtagaaaaggcttatgttccaaaattaacaggaactgtgaagggtagatttgctgaaatggagaaacaaagacaagaggaacaaaggaagagaacggaggaggaacgaaaacgcagaattgagcaggatatgttagaaaagaggaaaatacagcgtgaattagcaaaaagggctgaacagattgaggacaaaaacaatacgggaactgaatcagcatcagaggaaggagatgattcactacttataactgtggtacctgtcaaatcatataaaacatctggaaaaatgaaaaagaattttgaggatctagaaaaagaacgtgaagagaaagaaaggatcaagtacgaggaagataaaagaataagatatgaagaacaacgaccatctctcaaggaagcaaagtgtctttctttagttatggatgatgaaatagaaagtgaagcaaaaaaagaatcactttctcccggaaaattgaaactaacttttgaagaactggagcgacaaagacaagaaaaccgaaagaagcaagctgaagaggaagcaagaaaacgtttagaagaagagaagcgtgcttttgaagaagcaaggcggcaaatggtaaatgaagatgaggaaaaccaagacacagcaaaaatttttaaagggtaccgccctggtaaactcaaactcagttttgaagaaatggaaaggcaaagaagagaagatgaaaaaaggaaagcagaagaagaagccagaaggagaatagaggaagaaaagaaggcgtttgctgaagcaaggagaaatatggtagtagatgatgactccccagagatgtataagacaatctctcaagaatttcttacaccgggaaaactggaaattaattttgaagaattattaaaacaaaaaatggaagaagaaaaacgacgaacagaggaggaacggaagcataagctagaaatggagaaacaagaatttgaacaactgagacaggaaatgggagaggaagaggaagaaaatgaaacctttggattgagcagagaatatgaagaactgatcaaattaaaaaggagtggctctattcaagctaaaaacctaaaaagcaagtttgaaaaaattggacagttgtctgaaaaagaaatacagaaaaaaatagaagaagagcgagcaagaaggagagcaattgaccttgaaattaaagagcgagaagctgaaaattttcatgaggaagatgatgttgatgttaggcctgcaagaaaaagcgaggctccatttactcacaaagtgaatatgaaagctagatttgaacaaatggctaaggcaagagaagaagaagaacaaagaagaattgaagaacaaaagttactacgcatgcagtttgaacaaagggaaattgatgcagcactacaaaagaaaagagaagaggaggaggaggaagaaggtagcatcatgaatggctccactgctgaagatgaagagcaaaccagatcaggagctccatggttcaagaagcctcttaaaaacacatcagttgtagacagtgagccagtcagatttacggttaaagtaacaggagaacccaaaccagaaattacatggtggtttgaaggagaaatactgcaggatggagaagactatcaatatattgaaaggggagaaacttactgcctttacttaccagaaactttcccagaagatggaggagagtatatgtgtaaagcagtcaacaataaaggatctgcagctagtacctgtattcttaccattgaaagtaagaattaatcactctttttatcttttattctatta

SEQ ID NO: 45 - DNA, 1040 bp, Homo sapiens
  CDS (626)..(820)
tttgtctgtaatggcaatggcaagacctgaacttcaactttatttttcttaaggtgtcatcacaaagtgtttgaaggaccaaagatagtacttctaaaatttgacagggcttcattttgattttttctccccaaatagttgatagcaataatcaataccagttgagataccaaagaggcagcctttccctgattgccacaccacttgtaggcctttgctagaatggtcattaatacgtatgaatcagttgagctaaatattatttagaacgtggcaaaatgctggctgtaaattaaatcaaagataagtaattcaaaggctttaactgaaaatttctgaaaagatgtttgctgtgctattaaagatgttaaataacaaaaattaaaagaactgagaaagactataccatgaaagtgcataatagtgaagaaaaaaatgaagttcccttggcgttagccaggtgcatgcaaatctttttatctgaatgtagaaatgcaaaaagtaccaggagaacatttctgaaagtagtcaagtatgttttaacatttatctccttataatatgcaaactgccaaactggagttatgtttttagttggtaattgatatatatatatatttttgagatggagtttcactcgtcgcccaggctggagtgcagtggcacgatctcggctcactgcgacctccacctcctgggttcaagtgattctcctgcctccacctcccgagtagttgggaccacaggcgtgtgccaccatgcctggacagttttggggtttttttgtatttttagtggagacagggttttgccatcttgaccaggctaatctcgaacccctgacctcaggtgatccgccagccttggcctcccaaagtgctgggattatttgaggtcaggagttagtgatcagcctggtcaacatggtgaaacctcggcggccgctctagagtatccctcgaggggcccaagcttacgcgtacccagctttcttgtacaaagtggtgcctatagtgagtagtatcataagcttgatcact

SEQ ID NO: 46 - DNA, 2582 bp, Homo sapiens
  CDS (1549)..(2472)
atgagggaatacattgcctccaagcaccgacgggggctttccagctcggccctgccgcgcctcaccgaggccgaaaggaggctgctcaagggcacggtcgacttctgcgcgctcaaccacttcaccactaggttcgtgatgcacgagcagctggccggcagccgctacgactcggacagggacatccagtttctgcaggacatcacccgcctgagctcccccacgcgcctggctgtgattccctggggggtgcgcaagctgctgcggtgggtccggaggaactacggcgacatggacatttacatcaccgccagtggcatcgacgaccaggctctggaggatgaccggctccggaagtactacctagggaagtaccttcaggaggtgctgaaagcatacctgattgataaagtcagaatcaaaggctattatgcattcaaactggctgaagagaaatctaaacccagatttggattcttcacatctgattttaaagctaaatcctcaatacaattttacaacaaagctcactcgaaagtttggcataactacaacacacatttccgcccacatcagaagggttggttatcgatcacgttgggatctcattggatcgagccaaaccggtcggaaaacacgatggatatattcaaatgtcaacaatccatggtttctgtgcttggatggtttgccaaccctatccatggggatggcgactatccagaggggatgagaaagaagttgttctccgttctacccattttctctgaagcagagaagcatgagatgagaggcacagctgatttctttgccttttcttttggacccaacaacttcaagcccctaaacaccatggctaaaatgggacaaaatgtttcacttaatttaagagaagcgctgaactggattaaactggaatacaacaaccctcgaatcttgattgctgagaatggctggttcacagacagtcgtgtgaaaacagaagacaccacggccatctacatgatgaagaatttcctcagccaggtgcttcaagcaataaggttagatgaaatacgagtgtttggttatactgcctggtctctcctggatggctttgaatggcaggatgcttacaccatccgccgaggattattttatgtggattttaacagtaaacagaaagagcggaaacctaagtcttcagcacactactacaaacagatcatacgagaaaatggtttttctttaaaagagtccacgccagatgtgcagggccagtttccctgtgacttctcctggggtgtcactgaatctgttcttaaggttacattgtttctgtgtttgaacgtggcagtcaagaacataagaaatcatggtattcggcttttacatctgaacacaaacgtgtatgagatagccaaaacactacaaaatccacgagtctgcacatgtatctcaaaagaaccttcgacaactcaaagagtgcctgttagggtgttgcacgattgctactgcacttctcaatgtctgccgctgaagcctagcggacagctcggcaagcgccatatgagcctggcggcgccagatgcgaatcctgttgtgggctttttggcctattcccgcccctcagtcttgccgggatggcaccgcccgcataggacttccagggttgggctgagtgggagttcgactgctgggcctcgtaattctcgctttggggctgctccttccaggctgggacacactggggcccgctgtcggtctcccgtcctccgacatcttgtctggaacttccgcctggcagtctccagtaggagtggagctctaatgaagactattctcagcaatcagactgtcgacattccagaaaatggtatgagacttgatgtcttttacttacatctttactgcacgttccaagcgttgtgtggcctgacgagtgtgttctctcttctagtcgacattactctgaagggacgcacagttatcgtgaagggccccagaggaaccctgcggagggacttcaatcacatcaatgtagaactcagccttcttggaaagaaaaaaaagaggctccgggttgacaaatggtggggtaacagaaaggaactggctaccgttcggactatttgtagtcatgtacagaacatgatcaagggtgttacactgggcttccgttacaagatgaggtctgtgtatgctcacttccccatcaacgttgttatccaggagaatgggtctcttgttgaaatccgaaatttcttgggtgaaaaatatatccgcagggttcggatgagaccaggtgttgcttgttcagtatctcaagcccagaaagatgaattaatccttgaaggaaatgacattgagcttgtttcaaattcagcggctttgattcagcaagccacaacagttaaaaacaaggatatcaggaaatttttggatggtatctatgtctctgaaaaaggaactgttcagcaggctgatgaataagatctaagagttacctggctacagaaagaagatgccagatgacacttaagacctacttgtgatatttaaatgatgcaataaaagacctattgatttggaaaaaaaaaaaa

SEQ ID NO: 47 - DNA, 1436 bp, Homo sapiens
  CDS (469)..(1128)
catgcgtataccgttagatatacggagacccaagctggctagcgtttaaacttaagcttggtaccgagctcggatccactagtccagtgtggtggaattccacagttggacagagagaccctgtgccagtggagcacactctcctatcctggcctggtgaaggagctgtgtgccctcttcattggctctgagctccttccaaaagatgaattaaatgatctgatcgaccgagccttcagcagattccgtcacagagaagtggtccatctgtccaggttgaggaatgggctgaacgtgttggagctgtggcatggcgtcacatatgcatttaaggacctgtccctgtcctgcacaacacagttcctgcagtacttcctggagaagagggagaagcacgtcactgtggttgtaggaacatctggggacacaggaagtgctgccattgagagtgttcaaggggcaaagaacatggacattatcgttctgctgcccaaaggtcactgcacaaagattcaggagctccagatgacaacggtgctgaagcagaacgtacatgtgtttggagtggagggaaacagcgatgagctcgatgagccgatcaagactgtgtttgccgatgtggcttttgtcaagaagcacaatctgatgagcctgaattcgatcaactggtcccgggtcctggtgcagatggcccatcacttctttgcttacttccagtgtacgccatccttggacacacatcccctacccctggtggaggtggttgtgccaacaggggctgccggtaaccttgcagctgggtacattgctcaaaagataggcctgcccatccgtctggtcgtggcagtgaaccgcaatgacatcatccacaggactgtccagcagggagacttctctctctctgaggctgttaaatcaaccttggcatcagctatggacattcaggtgccctacaacatggagagggtgttctggctgctctctggctctgacagccaggtgacaagagccctcatggagcagtttgaaaggacccaaagtgtgaatctgcccaaggaactgcacagcaaggggccctcttcttctccaagcagtgggagagacaggactacgaaaaaatggctgtaatggagtgtgatgggtgctgtgtggaactgtgccttggaaactgtgggcccagaagagggagcgtgacagatatcccagggacagccatggtcagaggtggtggctgagctggcctccaaccaggaggagcagtttgccaggtagcgtcattgtagcaataagttcaaggtgccaattgtctgtctgtgtctctgtcctccatacccccccatccctaaacttcctctgtttcttattcctcctccaccttctcctttcccatctctctattctctcattggcctccggctgccacctgcccccatccc

SEQ ID NO: 48 - DNA, 1422 bp, Homo sapiens
  CDS (1)..(1422)
atgagggcagtgtcattgcttgtgttggttcttggggtcacaatgtcctatgtaatgccttggcctcaaactgagaattacaccatctacttccctggttctgaggccttcaaacttggacgagccataagctcacttcccagcatccagtatccagggtcttcagcttacagatggcctgttatggagcttctcagcctctataattacgcaaggagggccttgatgggcaacttagcaaatgtcattccctgggggtggtctgagaagatgaccattgagtatttaaatccggggacaggagaacttttaaacaacagccgaggcgatgcgcctcattcagaacatgtgcaccatcgccgagtaccccgcgccggcaacgccgcggcctccgactgctgtgtgggcgccgcggcgccgcctggtcaagatcgccgtggtggggccagcggcgtgggcaagaccgggagccgctgccccttgggagtgggcttagccgttgtctacgccacccgcctgcttccacagacgggggaaacaaggatcaagaatggccaggcagctttctggggacaccggcaccgccgccatcagaactttggggtgtttgagcctctgcaatgcctggcacagaaaggggagttagtgaagctagcccccctgggaggtcttgaagcactggtggtccggttcctcaccaaacgattcatcggtgactatgaaagaaatgcaggtaatctctatactagacaagttcagatagaaggtgaaaccctggctcttcaggttcaagacactccaggtattcaggtccatgagaacagcctgagctgcagtgaacagctgaataggtgcattcgctgggcagatgctgtggtgatcgttttctccatcactgactacaagagctatgaactcatcagccagctccaccagcacgtgcagcagctacacctgggcacccggctgcctgtggtggtcgtggccaacaaagctgacctgttgcacatcaaacaggttgaccctcagcttggactgcagctagccagcatgctaggctgctcattctatgaagtgtctgtcagtgaaaattataatgatgtctacagcgccttccacgtcctctgtaaagaggtcagtcacaaacagcagcctagcagtacacccgagaagcgaagaacctccctcattcccaggcccaagtcacccaacatgcaggacctgaagaggaggtttaagcaagccctctctgccaaagcatcttataagccattgttgaagcaagttgtggaggaaatatttcatcccgagaggccagattccgttgatattgaacacatgtcttcaggcctcactgatctccttaaaactggatttagcatgttcatgaagtccaacatcacagtgcctttaatacactaa

SEQ ID NO: 49 - DNA, 1072 bp, Homo sapiens
  CDS (240)..(626)
taagcttgcggccgcgtgagccgccggagcaggagctgcagcgacgtcgggagcagaagcggcggcgacacgacgcgcagcagctgcagcagctcaagcacctggagtccttttacgaaaaacctcctcctgggcttatcaaggaagatgagactaagccagaagattgcataccagatgtaccaggcaatgaacacgccagggaatttctggctcatgcaccaactaaaggactttggatgccactggggaaagaagtcaaagttatgcagtgttggcgttgcaaacgctatggtcaccgaacgggtgacaaagaatgccctttctttatcaaaggcaaccaaaagttagagcagttcagagtggcacatgaagatcccatgtatgacatcatacgagacaataaacgacatgaaaaggacgtaaggatacagcagttaaaacagttactggaggattctacctcagatgaagataggagcagctccagttcctctgaaggtaaagagaaacacaagaaaaagaagaagaaagaaaagcataagaaaaggaagaaagaaaagaaaaagaagaaaaaacggaagcacaaatcttccaagtcaaatgagggttctgactcagagtgacaaggatgtgacttgttcaacattctcttctcaaacactgaccaaggaacagaggaagatgcagtcagagaaagcagcaggatagagacgccgagagaggagtatatgtgggtcacagcagtgagctcccacccgccttgcagtgaagatgtgaccccaggagagggagtgtctccttccaggtgctagctctggacagcagctgattttaggcaggaaagtttcttcatcgttgtcctccctgctggtcacatgagtttacgattcctttgaagtgtctcccacagggtggcaggactgggagaatctctgaggcgtgtcttccaggccctcccacagcttgtgccctccacagtgtggactcaggtcccatagacatcaggctggagtcttctctgttgttgagaataataaaagctcattatttattttttaaaaaaaaaaaa

SEQ ID NO: 50 - DNA, 3087 bp, Homo sapiens
  CDS (1880)..(2284)
atggggtgtacaccttcacacagtgaccttgtaaacagcgttgcaaagagtggcattcagttcttgaaaaagcccaaagcaattcggccaggatgtcagggcggaagtgaaagaggttccatccctttgctggttaaaaactccacctgctatgacgctggggagggcctggcagaggagcagccaagtcccaggaggaaccaaaccacagctaaaggtctttgtcagctcatgggagatcctgcttcaggcaaaaggaaagatatggaaggactgatcccaggaaccaaaacctcttcatcccagctgaacaaatcacaaagccacatggctaaggatattccgttcaagacacagggttcccatggatcacaaggggcagacttttctggagatgagagtgaggaaagtagtacccaagatacttccaaatggaaaaggacagcaaaatgtcacacgtcaagcacacagagccactgctaccaaaccatccaccctgctcatgagcctgaaggcaaagtggacttcccggagcctctggtaaaggcccaccagcaggcttacacctatctacactccagcctctccaaatatgaagcaattctgtgcatcatccatcaggccacccagacccgggagctgctgcagcccatggtcagcttcttgctgctgtgctttgaggagatcagccagctgttgggggagatctccaaggatggagaagtgctcctgcaggaagtcagggaggatctggcttggcctttgaagaaaagagagccccaggagcagccaaatctcctgcaacagctgctacagtacacagtcagcaagctgcaggtgctcaatggcacagtggcctcgctcaccggcagcttcctggagggctccagcagctacctccactccactgcaacccacttggaaaataagctgagcacaaaaaggaatgtggatgaacgcctcctgagggctctgaggcagctagagagcctggcgagtggctgtggcgaccctggggtgcagggtctccccttatgctctgaggacagtggcattggtgctgacaatgagtccgtgcagtcggtggacaagctgggcaagcaaaccagctgggaccttgcaccagagcccgaagaatggaagtcggtgacttcaccccacacagaggccaggcagtcaggacacacctggcagcaaagtccattctgtttgggctcaggcagaccccaggactgcctgctctcaggggctcctatggcaaaggttcagccacgagcacaggacgaagcaaggagcccatgcctctccagtacaagcccagaaaatatcacctccccacctttgaagctggggacaagcaccccatgtgattcctttgggattggggtctctgtggaaccacacctttccaaaacctccaggccgatggacgcttcatctcttagtgacagcgaggacagcagcccagaggaggaggaggaagacaaaatgagcagcatgagtctgtgtgcctggcaggaaaaaactccacattcaaggccacaatcttcacctgctgaccgggaaagcccatttcaggcccgcaccaggaggcttaggagcctccaggcccaggaaatgattctgaagatgaaggagtcaatcagcgaaaggatcaagtttgtccctgtgccctgtgggcaccaggactggtctgaggaggaggaggggaggacagtggtccccccaagacctagcacggtaagtggcagcaggagggcccctgagaggcagacgaggtcccagtcagagtcgtgtctccagagtcacgtggaggaccccacctttcaggagctgcgaagggtccagagggacctcagtcagaagctggaggcattttatgccctgggtgccaaagggcaggggcagagccaggagcaaattctgcagcccagagcagccgccgtgtggcccaatggcacctgcagggtcagtccaagcaacaccaccagcaggctcaaggcatccctcaccaagaacttcagtattttgcctagtcaggacaagagcatcttgcagaaatgcaatccccatcctgaggacgaacaaggcaaagctgggaagcttccaaatgccatcccatcaggaagagcagaagcagccaagagtgaggagctcagctgtgaaatggaggggaacctcgaagcacctccctccaccgcctatggaagttctgatggacaaatcattcgcttctctggagtccccagaaagcagcaagtccacagagaactccaccaagtgaacccaggagccagggccgggagaggctggccccaccaggagaacatgggattccccaaagctgagggcctctgtgagccccctggacttgctgcccagcaagagcgccgccagcctgaccaagcctcacagcacagggccagggagtggcaggagcagctgccagcccaggaagccagccctggacctgagcagcccaccagccaccagccaaagccccgaggaggacagcttctgaccgccagccaggtggccgaccgcagcctcccaccttggaccccaccagcacctcttatgaatcccagctcggccagaacagtgctggtggcctcagtttacccccggaagccgcaagctgttgagcggcatgtccttcccatcctctggcacttcctgaacaccgccaccaggaatggcaccctgcctggacccagcgggaacatccgcggggtggtgtgccggctgtccaggagcctccaggagcacatgggctcccgcctgctggactttgccgccagccagccaaagcacgtcctcaagacgctccaggaactcttagactcagagtccttgggaggcagccgcaaggccactgacagaggggtggcccctgacagcaagacaactggcagctcatacccttttcagctggattaaagatggatctgaaatgggcaattattatttatcttatttttttgatggactattctcctggttactttcccccttagagttccagatgtacatggtatattttgaagtagaaataaaagaattacttatttttctaaaaaaaaaaaa

SEQ ID NO: 51 - DNA, 3619 bp, Homo sapiens
  CDS (1)..(1782)
atggagggcgcagggccccggggggccgggccggcgcggcgccggggagccggggggccgccgtcaccgctgctgccgtcgctgctgctgctgctgctgctctggatgctgccggacaccgtggcgcctcaggaactgaaccctcgcggccgcaacgtgtgccgtgctcccggctcccaggtgcccacgtgctgcgctggctggaggcagcaaggggacgagtgtgggattgcggtgtgcgaaggcaactccacgtgctcagagaacgaggtgtgcgtgaggcctggcgagtgccgctgccgccacggctacttcggtgccaactgcgacaccagtgagcgtggggtcgggccggtattggtcggtggggcggaatcctggagagatggggcggggtccaaggtggggcggggtcggatccgccttcggggcgggtccccagaggtggcggctggagtgcgggacgcgggcaggttccggctggctgggggcacctactcaagcaccggggccttccaccccctccgctcctcccctgcagagtgcccgcgccagttctggggccccgactgcaaggagctgtgtagctgccacccacacgggcagtgcgaggacgtgacaggccagtgtacttgtcacgcgcggcgctggggcgcgcgctgcgagcatgcgtgccagtgccagcacggcacgtgccacccgcggagcggcgcgtgccgctgtgagcccggctggtggggcgcgcagtgcgccagcgcgtgctactgcagcgccacgtcgcgctgcgacccacagaccggcgcctgcctgtgccacgcaggctggtggggccgcagctgcaacaaccagtgcgcctgcaactcgtctccctgcgagcagcagagcggccgctgtcagtgccgcgagcgtacgttcggcgcgcgctgcgatcgctactgccagtgcttccgcggccgctgccaccctgtggacggcacgtgtgcctgcgagccgggctaccgcggcaagtactgtcgcgagccgtgccccgccggcttctacggcttgggctgtcgccgccggtgtggccagtgcaagggccagcagccgtgcacggtggccgagggccgctgcttgacgtgcgagcccggctggaacggaaccaagtgcgaccagccttgcgccaccggtttctatggcgagggctgcagccaccgctgtccgccatgccgcgacgggcatgcctgtaaccatgtcaccggcaagtgtacgcgctgcaacgcgggctggatcggcgaccggtgcgagaccaagtgtagcaatggcacttacggcgaggactgcgccttcgtgtgcgccgactgcggcagcggacactgcgacttccagtcggggcgctgcctgtgcagccctggcgtccacgggccccactgtaacgtgacgtgcccgcccggactccacggcgcggactgtgctcaggcctgcagctgccacgaggacacgtgcgacccggtcactggtgcctgccacctagaaaccaaccagcgcaagggcgtgatgggcgcgggcgcgctgctcgtcctgctcgtctgcctgctgctctcgctgctcggctgctgctgcgcttgccgcggcaaggaccctacgcgccgaccccgccccgcagggagtttcgcttgggaggaagaaggcgccgcaccgactatgcgggcgcttcagtcgcatcagcatgaagctgccccggatcccgctccggaggcagaaactacccaaagtcgtagtggcccaccacgacctggataacacactcaactgcagcttcctggagccaccctcagggctggagcagccctcaccatcctggtcctctcgggcctccttctcctcgtttgacaccactgatgaaggccctgtgtactgtgtaccccatgaggaggcaccagcggagagccgggaccccgaagtccccactgtccctgccgaggcgccggcgccgtcccctgtgcccttgaccacgccagcctccgccgaggaggcgatacccctccccgcgtcctccgacagcgagcggtcggcgtccagcgtggaggggcccggaggggctctgtacgcgcgcgtggcccgacgcgaggcccggccggcccgggcccggggcgagattgggggcctgtcgctgtcgccatcgcccgagcgcaggaaaccgccgccacctgaccccgccaccaagcctaaggtgtcctggatccacggcaagcacagcgccgctgcagctggccgtgcgccctcaccaccgccgccaggctccgaggccgcgcccagccccagcaagaggaaacggacgcccagcgacaaatcggcgcatacggtcgaacacggcagcccccggacccgcgacccaacgccgcgccccccggggctgcccgaggaggcgacagccctcgctgcgccctcgccgcccagggcccgagcgcgcgccgcgccccggcctcttggagcccacggacgccggcggtcccccgcgaagcgcgccgaggctgcctccatgttggccgctgacgtgcgcggcaagactcgcagcctgggccgcgccgaggtggccctgggcgcgcagggccccagggaaaagccggcgcccccacagaaagccaagcgctccgtgccgccagcctcgcccgcccgcgcgcccccagcgaccgaaaccccggggcctgagaaggcggcgaccgacttgcccgcgcctgagaccccccggaagaagacccccatccagaagccgccgcgcaagaagagccgggaggcggcgggcgagctgggcagggcgggcgcacccaccctgtagcaggctgtggctcgtccgcgcgcagtccctcagcttcgcagcgccgcccgccaccccacacctcccacgctaccgggcacggcggcctcctattggccgggcaccgcgcggctagcggaggttgcgtctcattggctcaggtcctgcagccgctcctggattggagcagtgtgctctggcgggaagggcccatcccgttggtcgaggcctgacaggcgcttagcgggcgactccctccccattggccgagttatggagcgctccgaccagacagcgtctcattggccaaagatgggagggttccgcttaaagaccgcctcttactggccaggagtggacttggttagggctaccttctcattggttgcagccagaggcacttctgcccgggctgcctctcccccgctagggcctggtgcctctggctggaggctccctcccttggccgtcccaatagagcccggggctacttccactggccaggctcccgggcatctggttgaccccagcctggggaggagggctggtctccgctcctcaggggcttagtccgtcccaccccttcccttccctggcgccccgggcccaggcccctcagctgtcagctggttttgatggcctcccactgccccacacgccgcgggacctccaggggcgactctagtggcctgaggagatgtatttataggcccccagcagggctgctcccccctcggccggtgccccaggatgggctcctcccggcgggggcttggccaaagctttcttaataaaatgcctttcccctcaaaaaaaaaaaaa

SEQ ID NO: 52 - DNA, 2869 bp, Homo sapiens
  CDS (253)..(2829)
cacgtgacctgtttataaaaatatatattaaaaaagttgtaaaaacatgtgtctgagttgtttttaggtccccagacagcggtgtaggtgggcatatctgccctgcgcatcccaggtctcgggattctcctgtacctcttatcagatttattctttcttgcaacaaaggggtagaggctggatgccgacatggtagaatggaaacagcagtgactacatggaaggcagaggacctcccattcctgtgcagccatggagaagatgtcccgtgtgaccacagccctgggtggcagcgtgctgacaggccgcaccatgcactgccacctggatgctcccgccaatgccatcagtgtgtgccgcgacgcagcccaggtggtcgtggcaggccgtagcatcttcaagatctatgccatcgaggaggaacagttcgtggaaaagctgaacctgcgtgtggggcgcaagccttcgcttaacctgagctgtgctgacgtggtctggcaccagatggatgagaacctgctggccacagcagccaccaatggcgtggtggtcacgtggaacctgggccggccatcccgcaacaagcaggaccagctgttcacagaacacaagcgcacggtaaacaaagtctgcttccaccccaccgaagcccacgtgctgctcagtggctcccaggatggcttcatgaagtgctttgacctccgcagaaaggactctgtcagcaccttctcgggtgaggccacagaggcagggccacgggagtgggcgatggctgggtgcgttcctattctcccagtgctcagctgccgcatcctgaggctgcaccacagctttgctcatggaccgatgcaggatgcagaatctacggcaaatgacgcccgggaatcttggggatgtccactctaccctctgggcctctgttctgggccacaggcaggccagtcggagagcgtgcgggacgtgcagttcagtatccgggactacttcaccttcgcctccacctttgagaacggcaatgtgcagctctgggacatccggcgtcccgaccggtgcgagaggatgttcacagcccacaacggacccgtcttctgctgcgactggcaccccgaggacaggggctggttggccactggagggcgcgacaagatggtgaaggtctgggacatgaccacgcaccgtgccaaggagatgcactgtgtgcagaccatcgcctcggtggcccgtgtgaagtggcggccagagtgccgccaccacctggccacgtgctccatgatgggggaccacaacatctatgtttgggacgtgcgccggcccttcgtgccagctgccatgtttgaggaacaccgagacgtcaccacgggaattgcctggcgccacccccacgacccctccttcctgctgtctggctccaaggacagctcgctgtgccagcacctgttccgcgacgccagccagcccgtcgagcgcgccaaccctgagggcctctgctacggcctcttcggggacctggccttcgccgccaaggagagcctcgtggctgccgagtcggggcgcaagccctacactggcgaccggcgccaccccatcttctttaagcgcaagctggaccctgccgagcccttcgcaggcctcgcctccagtgccctcagtgtctttgagacggagccaggtggcggcggcatgcgctggtttgtggacacagctgagcgttatgcgctggctggccggccactggccgagctctgtgaccacaacgcaaaggtggctcgagagcttggccgcaaccaggtggcgcaaacgtggaccatgctgcggatcatctactgcagccctggcctagtgcccactgcaaacctcaaccacagtgtgggcaagggtggctcctgtggcctcccgctcatgaacagtttcaacctgaaggatatggccccagggttgggcagtgagacgcggctggaccgcagcaaaggagatgcacggagcgacacagttctgctcgactcctcggccacactcatcaccaatgaggataacgaggaaaccgagggcagcgacgtacctgccgactacctgctgggtgacgtggaaggtgaggaggacgagctgtacctgctggatccggaacacgcgcaccccgaggaccctgagtgcgtgctgccgcaggaggcctttccgctgcgccacgagatcgtggacacgcctcccgggcccgagcacctgcaggacaaggccgactccccgcacgtgagcggcagcgaggcggatgtggcctccctggcccccgtggactcctccttctcgctcctgtctgtctcacacgcgctctacgacagccgcctgccgcccgacttcttcggcgtgctggtgcgcgacatgctgcacttctacgctgagcagggcgacgtgcagatggctgtgtctgtgctcatcgtcctgggtgaacgggtgcgcaaggacatcgacgagcagacccaggagcactggtacacttcctacatcgacctgctgcagcgcttccgcctctggaacgtgtccaacgaggtggtcaagctgagcaccagccgcgccgtcagctgcctcaaccaggcctccaccaccctgcacgtcaactgcagccactgcaagcggcccatgagcagccggggctgggtctgcgacaggtgccaccgctgcgccagcatgtgtgccgtctgccaccacgtagtcaagggtctcttcgtgtggtgccagggctgcagccacggcggccacctgcagcacatcatgaagtggctggaaggcagctcccactgtcccgcaggctgcggccacctctgcgagtactcctgacggggcatctgctgggcttgcccgggcggccgcaagctta

SEQ ID NO: 53 - DNA, 2665 bp, Homo sapiens
  CDS (253)..(2625)
cacgtgacctgtttataaaaatatatattaaaaaagttgtaaaaacatgtgtctgagttgtttttaggtccccagacagcggtgtaggtgggcatatctgccctgcgcatcccaggtctcgggattctcctgtacctcttatcagatttattctttcttgcaacaaaggggtagaggctggatgccgacatggtagaatggaaacagcagtgactacatggaaggcagaggacctcccattcctgtgcagccatggagaagatgtcccgtgtgaccacagccctgggtggcagcgtgctgacaggccgcaccatgcactgccacctggatgctcccgccaatgccatcagtgtgtgccgcgacgcagcccaggtggtcgtggcaggccgtagcatcttcaagatctatgccatcgaggaggaacagttcgtggaaaagctgaacctgcgtgtggggcgcaagccttcgcttaacctgagctgtgctgacgtggtctggcaccagatggatgagaacctgctggccacagcagccaccaatggcgtggtggtcacgtggaacctgggccggccatcccgcaacaagcaggaccagctgttcacagaacacaagcgcacggtaaacaaagtctgcttccaccccaccgaagcccacgtgctgctcagtggctcccaggatggcttcatgaagtgctttgacctccgcagaaaggactctgtcagcaccttctcgggccagtcggagagcgtgcgggacgtgcagttcagtatccgggactacttcaccttcgcctccacctttgagaacggcaatgtgcagctctgggacatccggcgtcccgaccggtgcgagaggatgttcacagcccacaacggacccgtcttctgctgcgactggcaccccgaggacaggggctggttggccactggagggcgcgacaagatggtgaaggtctgggacatgaccacgcaccgtgccaaggagatgcactgtgtgcagaccatcgcctcggtggcccgtgtgaagtggcggccagagtgccgccaccacctggccacgtgctccatgatgggggaccacaacatctatgtttgggacgtgcgccggcccttcgtgccagctgccatgtttgaggaacaccgagacgtcaccacgggaattgcctggcgccacccccacgacccctccttcctgctgtctggctccaaggacagctcgctgtgccagcacctgttccgcgacgccagccagcccgtcgagcgcgccaaccctgagggcctctgctacggcctcttcggggacctggccttcgccgccaaggagagcctcgtggctgccgagtcggggcgcaagccctacactggcgaccggcgccaccccatcttctttaagcgcaagctggaccctgccgagcccttcgcaggcctcgcctccagtgccctcagtgtctttgagacggagccaggtggcggcggcatgcgctggtttgtggacacagctgagcgttatgcgctggctggccggccactggccgagctctgtgaccacaacgcaaaggtggctcgagagcttggccgcaaccaggtggcgcaaacgtggaccatgctgcggatcatctactgcagccctggcctagtgcccactgcaaacctcaaccacagtgtgggcaagggtggctcctgtggcctcccgctcatgaacagtttcaacctgaaggatatggccccagggttgggcagtgagacgcggctggaccgcagcaaaggagatgcacggagcgacacagttctgctcgactcctcggccacactcatcaccaatgaggataacgaggaaaccgagggcagcgacgtacctgccgactacctgctgggtgacgtggaaggtgaggaggacgagctgtacctgctggatccggaacacgcgcaccccgaggaccctgagtgcgtgctgccgcaggaggcctttccgctgcgccacgagatcgtggacacgcctcccgggcccgagcacctgcaggacaaggccgactccccgcacgtgagcggcagcgaggcggatgtggcctccctggcccccgtggactcctccttctcgctcctgtctgtctcacacgcgctctacgacagccgcctgccgcccgacttcttcggcgtgctggtgcgcgacatgctgcacttctacgctgagcagggcgacgtgcagatggctgtgtctgtgctcatcgtcctgggtgaacgggtgcgcaaggacatcgacgagcagacccaggagcactggtacacttcctacatcgacctgctgcagcgcttccgcctctggaacgtgtccaacgaggtggtcaagctgagcaccagccgcgccgtcagctgcctcaaccaggcctccaccaccctgcacgtcaactgcagccactgcaagcggcccatgagcagccggggctgggtctgcgacaggtgccaccgctgcgccagcatgtgtgccgtctgccaccacgtagtcaagggtctcttcgtgtggtgccagggctgcagccacggcggccacctgcagcacatcatgaagtggctggaaggcagctcccactgtcccgcaggctgcggccacctctgcgagtactcctgacggggcatctgctgggcttgcccgggcggccgcaagctta

SEQ ID NO: 54 - DNA, 6324 bp, Homo sapiens
  CDS (1)..(3573)
atggaggtggacaccgaggagaagcggcatcgcacgcggtccaaaggggttcgagttcccgtggaaccagccatacaagagctgttcagctgtcccacccctggctgtgacggcagtggtcatgtcagtggcaaatatgcaagacacagaagtgtatatggttgtcccttggcgaaaaaaagaaaaacacaagataaacagccccaggaacctgctcctaaacgaaagccatttgccgtgaaagcagacagctcctcagtggatgagtgtgacgacagtgatgggactgaggacatggatgagaaggaggaggatgagggggaggagtactccgaggacaatgacgagccaggggatgaggacgaggaggacgaggagggggaccgggaggaggaggaggagatcgaggaggaggatgaggacgatgacgaggatggagaagatgtggaggatgaagaagaggaagaggaggaggaggaggaggaggaagaggaagaagaaaacgaagaccatcaaatgaattgtcacaatactcgaataatgcaagacacagaaaaggatgataacaataatgacgaatatgacaattacgatgaactggtggccaagtcattgttaaacctcggcaaaatcgctgaggatgcagcctaccgggccaggactgagtcagaaatgaacagcaatacctccaatagtctggaagacgatagtgacaaaaacgaaaacctgggtcggaaaagtgagttgagtttagacttagacagtgatgttgttagagaaacagtggactcccttaaactattagcccaaggacacggtgttgtgctctcagaaaacatgaatgacagaaattatgcagacagcatgtcgcagcaagacagtagaaatatgaattacgtcatgttggggaagcccatgaacaacggactcatggaaaagatggtggaggagagcgatgaggaggtgtgtctgagcagtctggagtgtttgaggaatcagtgcttcgacctggccaggaagctcagtgagaccaacccgcaggagaggaatccgcagcagaacatgaacatccgtcagcatgtccggccagaagaggacttcccaggaaggacgccggacagaaactactcggacatgctgaacctcatgcggctggaggagcagttgagcccccggtcgagagtgtttgccagctgtgcgaaggaggatgggtgtcatgagcgggacgacgataccacctctgtgaactcggacaggtctgaagaggtgttcgacatgaccaaggggaacctgaccctgctggagaaagccatcgctttggaaacggaaagagcaaaggccatgagggagaagatggccatggaagctgggaggagggacaatatgaggtcatatgaggaccagtctccgagacaacttcccggggaggacagaaagcctaaatccagtgacagccatgtcaaaaagccatactatgatccctcaagaacagaaaagaaagagagcaagtgtccaacccccgggtgtgatggaaccggccacgtaactgggctgtacccacatcaccgcagcctgtccggatgcccgcacaaagatagggtccctccagaaatccttgccatgcatgaaagtgtcctcaagtgccccactccgggctgcacggggcgcgggcatgtcaacagcaacaggaactcccaccgaagcctctccggatgcccgatcgctgcagcagagaaactggccaaggcacaggaaaagcaccagagctgcgacgtgtccaagtccagccaggcctcggaccgcgtgctcaggccaatgtgctttgtgaagcagctggagattcctcagtatggctacagaaacaatgtccccacaactacgccgcgttccaacctggccaaggagctcgagaaatattccaagacctcgtttgaatacaacagttacgacaaccatacttatggcaagcgagccatagctcccaaggtgcaaaccagggatatatcccccaaaggatatgatgatgcgaagcggtactgcaaggaccccagccccagcagcagcagcaccagcagctacgcgcccagcagcagcagcaacctgagctgcggcgggggcagcagcgccagcagcacgtgcagcaagagcagcttcgactacacgcacgacatggaggcggcccacatggcggccaccgccatcctcaacctgtccacgcgctgccgcgagatgccgcagaacctgagcaccaagccgcaggacctgtgcgccacgcggaaccctgacatggaggtggatgagaacgggaccctggacctcagcatgaacaagcagaggccgcgggacagctgctgccccatcctgacccctctggagcccatgtccccccagcaacaggcagtgatgaacaaccggtgtttccagctgggcgagggcgactgctgggacttgcccgtagactacaccaaaatgaaaccccggaggatagacgaggacgagtccaaagacattactccagaagacttggacccattccaggaggctctagaagaaagacggtatcccggggaggtgaccatcccaagtcccaaacccaagtaccctcagtgcaaggagagcaaaaaggacttaataactctgtctggctgccccctggcggacaaaagcattcgaagtatgctggccaccagctcccaagaactcaagtgccccacgcctggctgtgatggttctggacatatcaccggcaattatgcttctcatcggagcctttcaggttgcccaagagcaaagaaaagtggtatcaggatagcacagagcaaagaagataaagaagatcaagaacccatcaggtgtccggtccccgggtgcgacggccagggccacatcactgggaagtacgcgtcccatcgcagcgcctccgggtgccccttggcggccaagaggcagaaagacgggtacctgaatggctcccagttctcctggaagtcggtcaagacggaaggcatgtcctgccccacgccagggtgcgacggctcaggccacgtcagcggcagcttcctcacacaccgcagcttgtcaggatgcccgagagccacgtcagcgatgaagaaggcaaagctttctggagagcagatgctgaccatcaaacagcgggccagcaacggtatagaaaatgatgaagaaatcaaacagttagatgaagaaatcaaggagctaaatgaatccaattcccagatggaagccgatatgattaaactcagaactcagattaccacgatggagagcaacctgaagaccatcgaagaggagaacaaagtgattgagcagcagaacgagtctctcctccacgagctggcgaacctgagccagtctctgatccacagcctggctaacatccagctgccgcacatggatccaatcaatgaacaaaattttgatgcttacgtgactactttgacggaaatgtatacaaatcaagatcgttatcagagtccagaaaataaagccctactggaaaatataaagcaggctgtgagaggaattcaattcaggtctgaacagctgctgtagtgatgaaactcttgcttaaaaaggatgcctcttgttttttgctgctgtaacttaccagaaagtgttctatatttatttctgtttgaatttgaaacagtgttatgcttacaagacttcataatgattttatgtcttgctttaaagatagtacctgcagaatagtttttgaatacacccacattttgtacgtttccatgtaagctgacatagtgttctgccatgtaatgtttatagctgctgatgtatgcacatttgggggtatatctatttctgaagaggtaagctgatcaaaataaatagagtgtaaattctttttaatgctttagtgattaaatgttttagtattttgaactgaaatggacacacaaacacacacacgcacacacagacccacagctttgaatgatcatgttgtggctgagcagccgctttttagacgttatcattttgcctcatgttggaggactttatggaatttaagaaatacattttgtgtgcatattgtttcatagcaagaattcgttgcaaaaatgctttatttttgaacaatgcttggaaatattatgtgacttttttgtttgtttgttttaggaggatggtgtatggtgggggcaataaatgaggttttttgcattccaaggaaatggcatatggattaactgtaagaaatgaaataagtaatttattgtaagacaacatcaagccatggaaacttggcagaagattcaaagcagcttaaacagcacttttaaattaactcctaagcgttacatggttgtgactatggaaactccagttaagacaggatcttatcagaggtggacaacgtgaagatttccttttccattttcaataaactttggaacaaccttctcgtatctcccctagagtttcgtgcccctctgaactgtctgttattgcaatgtagtttatcaacagaatttgtgtgttttcgatttaagctaaaagataatttaagaacatttatttccccttttcactttaaaaaattatgattattcctattattgttatgaaccttcttattttacatttgagggataaaggcaaatgatttgtgagtcttctagttactggaccgagttttctgctggatctggtgggaaggcagctcggtaaagtttccctcctgctccccccgcccgactttgactctgaatcagcatttggtcctattcagaggactcttaccacgacgtttctgttctacacttgggtggagaccagttgaccatagagcatttgcagagcctcattgtttgatttcttgtgactattctaagaatgaatgcaatcagattttaaaagtaactaaatatacttcagcacttttttgctttaaactagatcatcttagacttgtttataccttccagatttgattgttttactcccaatgactgcactatatgtatgcataagaccacttttgagcgctgtgttcccccttctgagtagtcctttgacgacgtgttgtgttttctgatgttgacttgagttccatttagtagcatctcttccttccatgtcttgatgttatgcaggaagtacagacgtactttaaatttttgttatgaaataaaaaaaagatgggttttgtaaaaataaaaaaaaaatatttttagcagaacaggacttacagggtcattgtccccacaatgtgccagtcgactatttgcacttaccttgtcctatatatccgtacggaggtgtgcaattcctcgtgtcagtagccttgtgacactgaacctggatggattatagaggagccctcacggctgatcaataatgttgcaaagggagactacagggatctcacgacgaatattctgatacaatactcaacctcggtatatatatatgtgtataaatatatgtatatcccagcggcactttatactgttcactgtacaaaagcttacagttttccacaaggactttaataactagctgggaaaagacgatgtaattatttcggggctctgcggaaccttctctgtacagcgccccctttctgttgtgctattggttgcagctgccatgctcagaatgcgttttgagagctgaagcaaggtgcttgcagtcacctgaggccgtccgtgtggcccagggccccagctgcctttagggcccccattgttcataacagcatatgcatttccccaccgcgttgtgtctgcagcttctttgccaatatagtaatgcttttagtagagtactagatagtatcagttttggattcttattgttatcacctatgtacaatggaaagggattttaagcacaaacctgctgctcatctaacgttggtacataatctcaaatcaaaagttatctgtgactattatatagggatcacaaaagtgtcacatattagaatgctgacctttcatatggattattgtgagtcatcagagtttattataacttattgttcatattcatttctaagttaatttaagtaatcatttattaagacagaattttgtataaactatttattgtgctctctgtggaactgaagtttgatttatttttgtactacacggcatgggtttgttgacactttaattttgctataaatgtgtggaatcacaagttgctgtgatacttcatttttaaattgtgaactttgtacaaattttgtcatgctggatgttaacacatcttactctaaataaacaaggtgttgccacatttgtagcacgaaggatctctaaaaaaaaaaaa

SEQ ID NO: 55 - DNA, 3062 bp, Homo sapiens
  CDS (1)..(2139)
atggagggcagtgggaccggaaaaagacgtggaaaagctgcgaaaacgagccttcgaatcatggacgcgcgggcccagctcctcctccgagttcctcatccggggccgtcactcacatccggggccctcactcacatccgggaccctcatccggggctctcacccacatccgggaccctcatgcctgggcggaggagggggggccctcattcgggaccctgcactccgtcgccggaagtgccaccgagaagcgccggcctcggggctgtctacagcggcccgggagaggctgtggtggccccgagcgcgagtgtagcagtgatggaggaaataccagcccaggaagcagcagggtcaccaagggtccagtttcagtctttggagacccagtctgagtgtctgtccccagagcctcagtttgtgcaggacaccgacatggaacgtggtctcactggggctccacctgttcctcaggtgcctgctcttccccgtgagggaagcccaggagaccaggcagctgcgctcttgacagccaggtaccagagcagccaggatgtgttatttcaggagtttgtgacattcgaggatgtggctgtgcaccttactcgagaggaatggggatacctggaccctgttcagagggacctctacagagaagtgatgttagagaattatgggaacgtggtctcactgggatttccaatttccaagcctgatgggatctcccagctggaacaggatctacaggtctttgatctggaaactaagactagagaagtcttaagagatgactgctcagatggagagaccagagaagagaacaagctgttgattcctaagcagaaaatttcggaagaagtgcattcatacaaagtgagagtaggaagactcaaacacgatattacccaagttcctgagactagagaagtgtataagtctgaggacagattagaaagacttcaggaaattctaaggaaatttctgtacctggagagagagtttaggcaaataacaatcagcaaggaaaccttcaccagtgagaagaacaatgaatgtcatgaacccgaaaaaagcttcagtctggactctactattgatgcagatcagagagttcttagaatacagaataccgatgacaatgataagtatgacatgagcttcaaccagaattcagcctctggtaaacatgaacacttaaatctaacagaggattttcagagtagtgaatgtaaggaaagcttaatggatctctcccaccttaataaatgggagagcatccctaacactgagaaatcctataaatgtgatgtatgtgggaaaattttccatcagagctcagcccttactagacatcagagaatccatactagagagaagccctacaaatgtaaagaatgtgaaaagtctttcagtcagagctcaagtcttagtcgacataaaagaatacacactagagaaaaaccttacaaatgtgaagcatctgataaatcctgtgaagcgtctgataaatcctgtagtccaagctcaggcataattcagcataagaaaattcacaccagagccaaatcttacaaatgtagcagttgtgaaagagtcttcagtcgtagtgtccaccttactcaacatcagaaaattcacaaagagatgccctgtaagtgtactgtatgtggcagtgacttctgccatacttcatacctacttgaacatcagagggtccatcatgaagagaaagcctatgagtatgatgaatatgggttggcctatattaaacaacaaggaattcatttcagagaaaagccctatacgtgtagtgaatgtggaaaagacttcagattgaattcacatcttattcagcatcaaagaattcacacaggagagaaagcacatgaatgtaatgaatgtggaaaagctttcagtcaaacctcatgccttattcagcatcacaaaatgcataggaaagagaaatcgtatgaatgtaatgagtatgagggcagtttcagtcatagctcagatcttatcctgcaacaagaagtcctcaccagacagaaagcctttgattgtgatgtatgggaaaagaactccagtcagagagcacatctagttcaacatcagagcattcataccaaagagaactcatgaatgtaatgaagatgggaagatatttatcaaattcaggcttcattcagcatctgagagttcacaccagggagaaatcatgtatgtactgcatgtggtaaagccttcagtcatagctcagccattgctcagcatcagataattcacaccagagagaaaccctctgaatgtgacgaatgaagaaaaggtattagtgttaaactcttaatcgactcctgcaaatctataccagtgagaaatcttacaaatgtattgaatgtggcaaatttttcatgctattagtattttcataccttagtcacatttggagaattcacatgggaataaaattccattgctgcaatgaatgtgaaaaagccatcagtcaaagaaactaccttgtttagtatcaaattcacgccatgcaaaaagattataaatgtaataagcatgtatgtgtgtgaggagattcagtcataacccaacgctcattcaacatcaaagaatttatacctaagagaacttatttgggtgtagtaaatggcagatctttcaataggagtttaactagtctttgtcatatcagaatatccatagtagacaagaatttgatgtaacgcaaatggaaaaactcgacaccacatttcaggctttacccaacatcgaaataatggagagaaaattgttgattatttgtttatgaaattgttaatacatagtcccaatctttttcattgcacaaaaatctagggttgacttggtaaatgcagtgacattttctcatggagttcctttatttaatatgtattctaagtaggtacgtttatttttacttttttattataattttgatattaaaaagaacagagatggggtcttgctttgttgcccaggctggtcttgaactcctggcctcaagcgatcctcccacctgtcctcccaaagtg

SEQ ID NO: 56 - DNA, 804 bp, Homo sapiens
  CDS (463)..(768)
taggtgacactatagaagagcgatgacgtcgcatgcacgcgtacgtaagcttggatcctctattatcggccgcctactactactaaattcgcggccgcgtcgaccacgaggcgatttgtgggccataccaaggatgtgctgagtgtggccttctcctctgacaaccggcagattgtctctggatctcgagataaaaccatcaagctatggaataccctgggtgtgtgcaaatacactgtccaggatgagagccactcagagtgggtgtcttgtgtccgcttctcgcccaacagcagcaaccctatcatcgtctcctgtggctgggacaagctggtcaaggtatggaacctggctaactgcaagctgaagaccaaccacattggccacacaggctatctgaacacggtgactgtctctccagatggatccctctgtgcttctggaggcaaggatggccaggccatgttatgggatctcaacgaaggcaaacacctttacacgctagatggtggggacatcatcaacgccctgtgcttcagccctaaccgctactggctgtgtgctgccacaggccccagcatcaagatctgggatttagagggaaagatcattgtagatgaactgaagcaagaagttatcagtaccagcagcaaggcagaaccaccccagtgcacctccctggcctggtctgctgatggccagactctgtttgctggctacacggacaacctggtgcgagtgtggcaggtgaccattggcacacgctagaagtttatggcagagctttacaaataaaaaaaaaaa

SEQ ID NO: 57 - DNA, 1730 bp, Homo sapiens
  CDS (234)..(1358)
gcacgagcccggctggtgtgtgtcggtgtgtatgtgtgtgtgtgagtgtgcgcgctccgagtgtgtgtgtatttgtgtatcggcggtcccgcaggtcccggatgttgcggacagtatgaggcaagcgcagggggacggggaccagcagctgtcgccgccgctctcagggtgaagagggaacagaaatctttgccccctgactttggaaatctcgtttaaccttcaaactggcgatgtcaagggttccaagtcctccacctccggcagaaatgtcgagtggccccgtagctgagagttggtgctacacacagatcaaggtagtgaaattctcctacatgtggaccatcaataactttagcttttgccgggaggaaatgggtgaagtcattaaaagttctacattttcatcaggagcaaatgataaactgaaatggtgtttgcgagtaaaccccaaagggttagatgaagaaagcaaagattacctgtcactttacctgttactggtcagctgtccaaagagtgaagttcgggcaaaattcaaattctccatcctgaatgccaagggagaagaaaccaaagctatggagagtcaacgggcatataggtttgtgcaaggcaaagactggggattcaagaaattcatccgtagagattttcttttggatgaggccaacgggcttctccctgatgacaagcttaccctcttctgcgaggtgagtgttgtgcaagattctgtcaacatttctggccagaataccatgaacatggtaaaggttcctgagtgccggctggcagatgagttaggaggactgtgggagaattcccggttcacagactgctgcttgtgtgttgccggccaggaattccaggctcacaaggctatcttagcagctcgttctccggtttttagtgccatgtttgaacatgaaatggaggagagcaaaaagaatcgagttgaaatcaatgatgtggagcctgaagtttttaaggaaatgatgtgcttcatttacacggggaaggctccaaacctcgacaaaatggctgatgatttgctggcagctgctgacaagtatgccctggagcgcttaaaggtcatgtgtgaggatgccctctgcagtaacctgtccgtggagaacgctgcagaaattctcatcctggccgacctccacagtgcagatcagttgaaaactcaggcagtggatttcatcaactatcatgcttcggatgtcttggagacctctgggtggaagtcaatggtggtgtcacatccccacttggtggctgaggcataccgctctctggcttcagcacagtgcccttttctgggacccccacgcaaacgcctgaagcaatcctaagatcctgcttgttgtaagactccgtttaatttccagaagcagcagccactgttgctgccactgaccaccaggtagacagcgcaatctgtggagcttttactctgttgtgaggggaagagactgcattgtggccccagacttttaaaacagcactaaataacttgggggaaacggggggagggaaaatgaaatgaaaaccctgttgctgcgtcactgtgttccctttggcctggctgagtttgatactgtggggattcagtttaggcgctggcccgaggatatcccagcggtggtacttcggagacacctgtctgcatctgactgagcagaacaaatcgtcaggtgcctggagcaaaaaggaaaaaaaaaaaa

SEQ ID NO: 58 - DNA, 1883 bp, Homo sapiens
  CDS (282)..(1694)
ccccccccccccccccccccccagaggtggactgtgtagcatcggcctatttaggtgacactatagaacaagtttgtacaaaaaagcaggctggtaccggtccggaattcccgggatcgcgaggcgtctggctcttcgcggcggcggcgaggggaaagggagcgcgggggctgggtggaatcgaggagtgaggaaaaagggaaggggcgggggagagggaccagggaaggcgtcggggggaatctcgcgagggttggagttttggcgagagtttgtggaagatggcgcctgttgtgacagggaaatttggtgagcggcctccacctaaacgacttactagggaagctatgcgaaattatttaaaagagcgaggggatcaaacagtacttattcttcatgcaaaagttgcacagaagtcatatggaaatgaaaaaaggtttttttgcccacctccttgtgtatatcttatgggcagtggatggaagaaaaaaaaagaacaaatggaacgcgatggttgttctgaacaagagtctcaaccgtgtgcatttattgggataggaaatagtgaccaagaaatgcagcagctaaacttggaaggaaagaactattgcacagccaaaacattgtatatatctgactcagacaagcgaaagcacttcatgttgtctgtaaagatgttctatggcaacagtgatgacattggtgtgttcctcagcaagcggataaaagtcatctccaaaccttccaaaaagaagcagtcattgaaaaatgctgacttatgcattgcctcaggaacaaaggtggctctgtttaatcgactacgatcccagacagttagtaccagatacttgcatgtagaaggagtggatgatgatgaatcagaaggagaagaattcacagtccgagatggctacatccattatggacaaacagtcaaacttgtgtgctcagttactggcatggcactcccaagattgataattaggaaagttgataagcagaccgcattattggatgcagatgatcctgtgtcacaactccataaatgtgcattttaccttaaggatacagaaagaatgtatttgtgcctttctcaagaaagaataattcaatttcaggccactccatgtccaaaagaaccaaataaagagatgataaatgatggcgcttcctggacaatcattagcacagataaggcagagtatacattttatgagggaatgggccctgtccttgccccagtcactcctgtgcctgtggtagagagccttcagttgaatggcggtggggacgtagcaatgcttgaacttacaggacagaatttcactccaaatttacgagtgtggtttggggatgtagaagctgaaactatgtacaggtgtggagagagtatgctctgtgtcgtcccagacatttctgcattccgagaaggttggagatgggtccggcaaccagtccaggttccagtaactttggtccgaaatgatggaatcatttattccaccagccttacctttacctacacaccagaaccagggccgcggccacattgcagtgcagcaggagcaatccttcgagccaattcaagccaggtgccccctaacgaatcaaacacaaacagcgagggaagttacacaaacgccagcacaaattcaaccagtgtcacatcatctacagccacagtggtatcctaactaccgtctttttgctaggacttaaactgacttgagtgtggcaaaaagttaacaaaaaaggagaaaaaatgaacaatcgtttgtggtttcttgggaaaacttttcataccaggtgatactattcaaaaaccccgttgtctccctgcaagtgctgatttgaaatgcagaagccacagtaaaaaaaaaaaa

SEQ ID NO: 59 - DNA, 647 bp, Homo sapiens
  CDS (113)..(547)
aataacgactcactatagggaatttggccctcgaggccaagaattcggcacgagcgagcccggaaggtccggcgcccagagctaacgggagtcccaggttaaacactttaagatgagaaaaattgatctctgtctgagctctgaagggtccgaagtgattttagctacatcaagtgatgaaaaacacccacctgaaaatatcattgatgggaatccagaaacgttttggaccaccacaggaatgtttccccaggaattcattatttgtttccacaaacatgtaaggattgaaaggcttgtaatccaaagttactttgtacagaccttgaagattgaaaaaagcacgtctaaagagccagttgattttgagcaatggattgaaaaagatttggtacacacagaggggcagcttcaaaatgaagaaattgtggcacatgatggctccgctacttacttgagattcattattgtatcagcctttgatcattttgcatctgtgcatagcgtttctgcagaaggaacagtagtctcaaatctttcctcataatgataacaaaatgctcttgcatgattttttaacaatatatttaaacaggaagttgtcactgatatactttattaaaaggatttttatcaaaaaaaaaaaa

SEQ ID NO: 60 - DNA, 578 bp, Homo sapiens
  CDS (113)..(478)
aataacgactcactatagggaatttggccctcgaggccaagaattcggcacgagcgagcccggaaggtccggcgcccagagctaacgggagtcccaggttaaacactttaagatgagaaaaattgatctctgtctgagctctgaagggtccgaagtgattttagctacatcaagtgatgaaaaacacccacctgaaaatatcattgatgggaatccagaaacgttttggaccaccacaggaatgtttccccaggaattcattatttgtttccacaaacatgtaaggattgaaaggcttgtaatccaaagttactttgatttggtacacacagaggggcagcttcaaaatgaagaaattgtggcacatgatggctccgctacttacttgagattcattattgtatcagcctttgatcattttgcatctgtgcatagcgtttctgcagaaggaacagtagtctcaaatctttcctcataatgataacaaaatgctcttgcatgattttttaacaatatatttaaacaggaagttgtcactgatatactttattaaaaggatttttatcaaaaaaaaaaaa

SEQ ID NO: 61 - DNA, 499 bp, Homo sapiens
  CDS (93)..(344)
atacgactcactatagggaatttggccctcgaggccaagaattcggcacgagggtgttcagttgtggcggttgctggtcagtaacagccaagatgctgcggaatctgctggctcttcgtcagattgggcagaggacgataagcactgcttcccgcaggcattttaaaaataaagttccggagaagcaaaaactgttccaggaggatgatgaaattccactgtatctaaagggtggggtagctgatgccctcctgtatagagccaccatgattcttacagttggtggaacagcatatgccatatatgagctggctgtggcttcatttcccaagaagcaggagtgacttcagtcatcccagcaatcgcttggttcagtttcattcagctctctatggaccagtaatctgataaataaccgagctcttctttggggatcaatatttattgacttgtagtaactgccaccaataaagcagtctttaccatgaaaaaaaaaaaa

SEQ ID NO: 62 - DNA, 1233 bp, Homo sapiens
  CDS (353)..(826)
ggaattcccctaaaccaccagtgaaccccactgctctccagatgaggtcgcaaggaccaaccagtgcctacccgcccatgctcccccgaaactgggaactgacagcccagcccctccaaagccccttcctccagcttcagctgccaggtcagcaagggtgaggccggaagcaggcgggtgactcaccctgggcacctccgagcctcagtttccccatggatgcaacctgaggcctcctcactgagtcaaaaccgagacgcctctggtccccggagaggctgctggctctggggaaaggagagagcagcccagtgtgacagagcgagtccccacggctctgggagtgcctcgcatgtgtgtggcccaggtcctgacagcccacctactccctccccggcaggcactgggctccctctgctccccgtgggccgctccccgcgtggggccactgcccccggcccccgccatggtgcggatttcaaagcccaagacgtttcaggcctacttggatgattgtcaccggaggtatagctgtgcccactgccgcgctcacctggccaaccacgacgacctcatctccaagtccttccagggcagtcaggggcgtgcctacctcttcaactcagtggtgaacgtgggctgcgggccagccgaggagcgggtgctgctgaccggcctccatgctgtcgccgacatccactgcgagaactgcaagaccactttgggctggaaatatgaacaggcctttgagagcagccagaagtacaaagaggggaagtacatcattgaactcaaccacatgatcaaagacaacggctgggactgacccccgctcccccgacgcatgtggctccagcccggcctggccgccagggagcgccactggcttcccgccacccgaagggagctctggaccctcagagcccctgcagaggacggatctagctcctgtatatatattttattgcatgcactgtgaccttggggggagaacagaagggggacgacgcccccgcacctcctgcgatctggctggcttggatctcgtttttaacccgttcctgccccacctgccctatagttatggcctgtgttctgctctcctggtcccagtgcaccgtctgctctgtgaactcctcccaccaggcccttcttaccccacgcgtgtctgtccccctcgttctgtagcgtttgtacataataaaacaatggagtggagacaaaaaaaaaaaa

SEQ ID NO: 63 - DNA, 1181 bp, Homo sapiens
  CDS (116)..(964)
tcgcatttagctataactatctattcgatgatgaagataccccaccaaacccaaaaaaagagatctctcgaggatccgaattcgcggccgcgtcgacggggcagaggttgggaagatggcgaggcgaggctgggcgcagacaggctggggctgcggccaagcgtggggtgcgtcggggggcggccgcagctgcgaggagctcactgcggtcctaaccccgccgcagctcctcggacgcaggtttaacttctttattcaacaaaaatgcggattcagaaaagcacccaggaaggttgaacctcgaagatcagacccagggacaagtggtgaagcatacaagagaagtgctttgattcctcctgtggaagaaacagtcttttatccttctccctatcctataaggagtctcataaaacctttattttttactgttgggattaacaagtggtggaataacctaagtgatggccagcggactgtgacaggtattatagctgcaaatgtccttgtattctgtttatggagagtaccttctctgcagcggacaatgatcagatatttcacatcgaatccagcctcaagtgttatttccaattttgtcagttacgtgggtaaagttgccacaggaagatatggaccatcacttggtgcatctggtgccatcatgacagtcctcgcagctgtctgcactaagatcccagaagggaggcttgccattattttccttccgatgttcacgttcacagcagggaatgccctgaaagccattatcgccatggatacagcaggaatgatcctgggatggaaattttttgatcatgcggcacatcttgggggagctctttttggaatatggtatgttacttacggtcatgaactgatttggaagaacagggagccgctagtgaaaatctggcatgaaataaggactaatggccccaaaaaaggaggtggctctaagtaaaactgggattggacagtagtggtgcatctggtccttgccgcctgagagccccaggagacatcggctagagtgaccatggctatgctcccgtctggaagatgccagcatctggcctcccactgttttcagctgtgtcccccagtccgtgtctttttagaatgtgaatgatgataaagttgtgaaataaaggtttctatctagtttgtaaaaaaaaaaa

SEQ ID NO: 64 - DNA, 1148 bp, Homo sapiens
  CDS (189)..(791)
gacggcctgttccttgcctttaggtgacactatagaagagctatgacgtcgcatgcacgcgtacgtaagcttggatcctctagagcggcgcctactactactaactccccggccggtcgacctcctgcagcgtctggggtttccgttgcagtcctcggaaccaggacctcggcgtggcctagcgagttatggcgacgaaggccgtgtgcgtgctgaagggcgacggcccagtgcagggcatcatcaatttcgagcagaaggcaagggctgggacggaggcttgtttgcgaggccgctcccacccgctcgtccccccgcgcacctttgttaggagcgggtcgcccgccaggcctcggggccgccctggtccagcgcccggtcccggcccgtgccgcccggaaagtaatggaccagtgaaggtgtggggaagcattaaaggactgactgaaggcctgcatggattccatgttcatgagtttggagataatacagcaggctgtaccagtgcaggtcctcactttaatcctctatccagaaaacacggtgggccaaaggatgaagagaggcatgttggagacttgggcaatgtgactgctgacaaagatggtgtggccgatgtgtctattgaagattctgtgatctcactctcaggagaccattgcatcattggccgcacactggtggtccatgaaaaagcagatgacttgggcaaaggtggaaatgaagaaagtacaaagacaggaaacgctggaagtcgtttggcttgtggtgtaattgggatcgcccaataaacattcccttggatgtagtctgaggccccttaactcatctgttatcctgctagctgtagaaatgtatcctgataaacattaaacactgtaatcttaaaagtgtaattgtgtgactttttcagagttgctttaaagtacctgtagtgagaaactgatttatgatcacttggaagatttgtatagttttataaaactcagttaaaatgtctgtttcaatgacctgtattttgccagacttaaatcacagatgggtattaaacttgtcagaatttctttgtcattcaagcctgtgaataaaaaccctgtatggcacttattatgaggctattaaaagaatccaaattcaaaaaaaaaaaa

SEQ ID NO: 65 - DNA, 849 bp, Homo sapiens
  CDS (54)..(791)
gggtcgacccacgcgtccgagtaggcagagagcggacctggcggccgggcagcatggcggggctggagctcttgtcggaccagggctaccgggtggacgggcggcgcgccggggagctgcgcaagatccaggcgcggatgggcgtgttcgcgcaggctgacggctcggcctacattgagcagggcaacaccaaggcactggctgtggtctacggcccgcacgagatccggggctcccgggctcgagccctgccggacagggccctagtgaactgtcaatatagttcagcgaccttcagcacaggtgagcgcaagcgacggccacatggggaccgtaagtcctgtgagatgggcctgcagctccgccagactttcgaagcagccatcctcacacagctgcacccacgctcccagattgatatctatgtgcaggtgctacaggcagatggtgggacctatgcagcttgtgtgaatgcagccacgctggcagtgctggatgccgggatacccatgagagactttgtgtgtgcgtgctcagctggcttcgtggacggcacagccctggcggacctcagccatgtggaggaagcagctggtggcccccagctggccctggccctgctgccagcctcaggacagattgcgctgcttgagatggatgcccggctgcacgaggaccacctggagcgggtgttggaggctgctgcccaggctgcccgagatgtgcacaccctcttagatcgagtggtccggcagcatgtgcgtgaggcctctatcttgctgggggactgaccacccagccacccatgtccagaataaaaccctcctctgcccacacaaaaaaaaaaaa

SEQ ID NO: 66 - DNA, 3260 bp, Homo sapiens
  CDS (29)..(3229)
gccaaactccgagtcgttcctctggtggatggcctgctggcgtgccgatgtctgttgtgtgctcttccgccagcattctcccttcaacgtcctctggacgtccagctgcttgtatgttcttccgccgatgtgttcctctcgacgtccagccgctttgaatttcataaaggacaatagccgagcccttattcaaagaatgggaatgactattataaagcaaatcacagatgacctatttgtatggaatgttctgaatcgcgaagaagtaaacatcatttgctgcgagaaggtggagcaggatgctgctagggggatcattcacatgattttgaaaaagggttcagagtcctgtaacctctttcttaaatcccttaaggagtggaactatcctctatttcaggacttgaatggacaaagtctttttcatcagacatcagaaggagacttggacgatttggctcaggatttaaaggacttgtaccataccccatcttttctgaacttttatccccttggtgaagatattgacattatttttaacttgaaaagcaccttcacagaacctgtcctgtggaggaaggaccaacaccatcaccgcgtggagcagctgaccctgaatggcctcctgcaggctcttcagagcccctgcatcattgaaggggaatctggcaaaggcaagtccactctgctgcagcgaattgccatgctctggggctccggaaagtgcaaggctctgaccaagttcaaattcgtcttcttcctccgtctcagcagggcccagggtggactttttgaaaccctctgtgatcaactcctggatatacctggcacaatcaggaagcagacattcatggccatgctgctgaagctgcggcagagggttcttttccttcttgatggctacaatgaattcaagccccagaactgcccagaaatcgaagccctgataaaggaaaaccaccgcttcaagaacatggtcatcgtcaccactaccactgagtgcctgaggcacatacggcagtttggtgccctgactgctgaggtgggggatatgacagaagacagcgcccaggctctcatccgagaagtgctgatcaaggagcttgctgaaggcttgttgctccaaattcagaaatccaggtgcttgaggaatctcatgaagacccctctctttgtggtcatcacttgtgcaatccagatgggtgaaagtgagttccactctcacacacaaacaacgctgttccataccttctatgatctgttgatacagaaaaacaaacacaaacataaaggtgtggctgcaagtgacttcattcggagcctggaccactgtggagacctagctctggagggtgtgttctcccacaagtttgatttcgaactgcaggatgtgtccagcgtgaatgaggatgtcctgctgacaactgggctcctctgtaaatatacagctcaaaggttcaagccaaagtataaattctttcacaagtcattccaggagtacacagcaggacgaagactcagcagtttattgacgtctcatgagccagaggaggtgaccaaggggaatggttacttgcagaaaatggtttccatttcggacattacatccacttatagcagcctgctccggtacacctgtgggtcatctgtggaagccaccagggctgttatgaagcacctcgcagcagtgtatcaacacggctgccttctcggactttccatcgccaagaggcctctctggagacaggaatctttgcaaagtgtgaaaaacaccactgagcaagaaattctgaaagccataaacatcaattcctttgtagagtgtggcatccatttatatcaagagagtacatccaaatcagccctgagccaagaatttgaagctttctttcaaggtaaaagcttatatatcaactcagggaacatccccgattacttatttgacttctttgaacatttgcccaattgtgcaagtgccctggacttcattaaactgggcttttatgggggagctatggcttcatgggaaaaggctgcagaagacacaggtggaatccacatggaagaggccccagaaacctacattcccagcagggctgtatctttgttcttcaactggaagcaggaattcaggactctggaggtcacactccgggatttcagcaagttgaataagcaagatatcagatatctggggaaaatattcagctctgccacaagcctcaggctgcaaataaagagatgtgctggtgtggctggaagcctcagtttggtcctcagcacctgtaagaacatttattctctcatggtggaagccagtcccctcaccatagaagatgagaggcacatcacatctgtaacaaacctgaaaaccttgagtattcatgacctacagaatcaacggctgccgggtggtctgactgacagcttgggtaacttgaagaaccttacaaagctcataatggataacataaagatgaatgaagaagatgctataaaactagctgaaggcctgaaaaacctgaagaagatgtgtttatttcatttgacccacttgtctgacattggagagggaatggattacatagtcaagtctctgtcaagtgaaccctgtgaccttgaagaaattcaattagtctcctgctgcttgtctgcaaatgcagtgaaaatcctagctcagaatcttcacaatttggtcaaactgagcattcttgatttatcagaaaattacctggaaaaagatggaaatgaagctcttcatgaactgatcgacaggatgaacgtgctagaacagctcaccgcactgatgctgccctggggctgtgacgtgcaaggcagcctgagcagcctgttgaaacatttggaggaggtcccacaactcgtcaagcttgggttgaaaaactggagactcacagatacagagattagaattttaggtgcattttttggaaagaaccctctgaaaaacttccagcagttgaatttggcgggaaatcgtgtgagcagtgatggatggcttgccttcatgggtgtatttgagaatcttaagcaattagtgttttttgactttagtactaaagaatttctacctgatccagcattagtcagaaaacttagccaagtgttatccaagttaacttttctgcaagaagctaggcttgttgggtggcaatttgatgatgatgatctcagtgttattacaggtgcttttaaactagtaactgcttaaataaagtgtactcgaagccaaaaaaaaaaaa

SEQ ID NO: 67 - DNA, 853 bp, Homo sapiens
  CDS (409)..(687)
ctctgtttccacatgctttctccagtataggatttctcagccttttcactattgacaattttggctggataatcctttgttgtggaggagctctcctgggcattgcagatgttaggaagaattcctggcctctttgcccagatccaaaatctgggcaaagaaaaaatcttctggaaagaattcagcattctagatgccaataaaaacactgatgtttcatggaaggagatcaaaatagcaacattaacaggggtctggaagaagttgattctgacttttgaaactgtcagtttcaaaatttcattgtaggaagtaactgtggatgtggtagaaacagcaagagaacttgaattagaagtgaaccctgaaaatgtgactagattgctgctatctcatgatcaaatttaaatggatgaggagttgcttcatagggatgaacaaagaaagtggtttcttgagatgagatctactcctggtgaagatgctgcgaacaacgttgaaatgacaacaaaggacttaaactatgacagaaacttagttgataaagcagtggtagggtttgaaaggactgactccaattttgaaagaagttgtactgtgggtaaacagcattgcatgatacagagaaattgttcatggaaagaagagtacatggatgcagcaaacttcattgttgtcttattttaagaaattgccacagccactccatccttcagcaaccaccaccctggtctattagaaaccatcaatatcaaggcaagattctccaccaacaaaaagctatgactcactgatggctcagatgatcattagcatttttcagcaataaagtatttctacattaaaaaaaaaa

SEQ ID NO: 68 - DNA, 2727 bp, Homo sapiens
  CDS (1)..(2442)
atgaggagagaccccacgccgcccaggggcctcccgcggcagaggccgacgccgagcccaaggacacgctcccggggacaccaaagccaaaggccaaaggccaagtccgagccccagcccgcgcccgcggcgacccccggaggccgaagggcgtgggaaccacgggcgcaagccggctgcccacccccgccccgggccgcctctcccaggagattagtgcagggcgagcggccggaatccgggaaccgtagccgacaggcagcttacccacgccgcgccagccgggcacgaacctgcacaacgcgacttccaccaaccttgcgccagcgcgcactgacgcagcgcccatgctcggtacccaggaccaatagaaagctccgaaggggacctgggccaatcacattgcgccgccctgagtcgtgctcccgccccgcgtttgctacggaggcccacgacgcccaggcgcttccgcgaccacccggagtgattgcccggcagagcgcgatgcatagagctctggctgctttaaaaaataaacctctaaatcatgttcacaaggtagtcaaggagcgtctgtgcccttggttgtgttcacgacaacctgagcctttcggggtcaaattccatcatgcccattgtaaaaagtttcattcgaaaaatggaaatgaccttcatccactcggtggaccagtgttctctcaagtatctgactgcgacaggcttgaacaaaatgttaaaaatgaggagagtcagatgttttacaggagactgagcaacttgacttcatcagaagaagtgctaagttttataagcacgatggaaaccctgcctgacactatggcagcaggagctttacaacgaatttgtgaagtggaaaaaaaggatggtgatcaagggctgccaaaagaaatactggagaatagcatctttcaagctttatgctttcagtttgaaaaggagccctcacagctgtcaaacactagtttagtgactgctttgcaagctctgattctgttgcatgtggatcctcaaagtagcctgttgctgaacctggtggcagaatgccaaaatcgtctcagaaaaggtggcatggaagttcgcaatctttgtattcttggggaaagtctgattacactgcacagttcaggttgtgtgacactagaactcattataaatcaacttcaaggtgaaaaattggaaacatttaccccggaggatattgtggccctttatagaatcttgcaggcatgtactgaaaaagtggatgaacaccaaacatttttaaataagataaacaacttttccctatcaatagtttccaacctgagtcctaaattgattagccaaatgctcactgccctggtggttcttgatcaaagtcaagcatttcctctgattataaaattgggcaaatatgtcgtgaggcatgtcccacatttcactaacgaggagcttaggagagtcttggaggcgttcatatattttgggcaccatgacacattttttacaaaagccctagagcatcgtgtagctgcggtgtgcctcacgttggatcctgaagttgtctgcagggtcatggagtactgcagtagagaactgattctttcaaaacccatcctcaatgcagtggcagaaacttttgtttgccaaacagaaaaattttcacctcgtcagatttctgcgttaatggaaccatttgggaaactcaattatttgccaccaaatgcctctgctttatttagaaagctggaaaacgtgctattcactcatttcaattattttccacccaaatcattattgaaacttcttcattcatgttcacttaatgaatgccatccagtcaactttctggcaaaaatattcaagcctcttttccttcaacggctgcaaggtaaagaatctcatttggacacattgagtcgggcacaactgacccaacttttcttagcctcagtcctggaatgccctttctataagggtccaaaactccttcctaaatatcaagtgaagtcatttcttaccccatgctgttccctggagacccctgtggattctcagctttatagatatgtgaagattgggctgactaaccttttaggagcaagattatattttgctccaaaagtgttgacaccctattgttatacaatagatgttgaaattaaattagatgaagaaggatttgtattgccatccacagctaatgaagatatccataaaaggatagcactgtgtattgatggtccaaaaaggttttgctccaatagcaaacacttactggggaaagaagctattaaacaaagacacctacagttactcggttatcaagttgttcagatcccctatcatgagattgggatgctaaaatcaagacgtgaattggtggaatatttacaaagaaaactgttttctcaaaacactgttcattggttgcaagaatgaatactgacttcagaactcaaacaatggaagaacttgcatttttatggaactcagtattaaaagaaaaatataatgtgaattagccactttgcagaatatgttctagactggtgatctgaaagcatctgtagttttccttatactatgtatacatttattgtggtaaaatttaaaattaattttaatttaatactagtgtcatagatactttttgtacatcaaacaattgatcatgtgctgtaaaggaattcaatgaataaatgttatttttaagtaaaaaaaaaa

SEQ ID NO: 69 - DNA, 1397 bp, Homo sapiens
  CDS (52)..(612)
acggccagtgaattgaatttaggtgacactatagaagagctatgacgtcgcatgcacgcgtacgtaagcttggatcctctagagcggccgcctactactactaaattcgcggccgcgtcgaccgcagctagctcagcaggcggcagcggcggcctgagcttcagggcagccagctccctcccggtctcgccttccctcgcggtcagcatgaaagccttcagtcccgtgaggtccgttaggaaaaacagcctgtcggaccacagcctgggcatctcccggagcaaaacccctgtggacgacccgatgagcctgctatacaacatgaacgactgctactccaagctcaaggagctggtgcccagcatcccccagaacaagaaggtgagcaagatggaaatcctgcagcacgtcatcgactacatcttggacctgcagatcgccctggactcgcatcccactattgtcagcctgcatcaccagagacccgggcagaaccaggcgtccaggacgccgctgaccaccctcaacacggatatcagcatcctgtccttgcaggcttctgaattcccttctgagttaatgtcaaatgacagcaaagcactgtgtggctgaataagcggtgttcatgatttcttttattctttgcacaacaacaacaacaacaaattcacggaatcttttaagtgctgaacttatttttcaaccatttcacaaggaggacaagttgaatggacctttttaaaaagaaaaaaaaaatggaaggaaaactaagaatgatcatcttcccagggtgttctcttacttggactgtgatattcgttatttatgaaaaagacttttaaatgccctttctgcagttggaaggttttctttatatactattcccaccatggggagcgaaaacgttaaaatcacaaggaattgcccaatctaagcagactttgccttttttcaaaggtggagcgtgaataccagaaggatccagtattcagtcacttaaatgaagtcttttggtcagaaattacctttttgacacaagcctactgaatgctgtgtatatatttatatataaatatatctatttgagtgaaaccttgtgaactctttaattagagttttcttgtatagtggcagagatgtctatttctgcattcaaaagtgtaatgatgtacttattcatgctaaactttttataaaagtttagttgtaaacttaacccttttatacaaaataaatcaagtgtgtttattgaatggtgattgcctgctttatttcagaggaccagtgctttgatttttattatgctatgttataactgaacccaaataaatacaagttcaaatttatgtagactgtataagattataataaaacatgtctgaagtcaaaaaaaaaaa

SEQ ID NO: 70 - DNA, 978 bp, Homo sapiens
  CDS (199)..(357)
cccaggtgagggattggaacgactgcagaagcgacttgaatttaggtgacactatagaagagctatgacgtcgcatgcacgcgtacgtaagcttggatcctttagagcggccgcctactactactaaattcgcggccgcgtcgacatggttctgtggtgcagtttaagattaagaggcatacaccacttagtaaactaatgaaagcctattgtgaacgacagggattgtcaatgaggcagatcagattccgatttgacgggcaaccaatcaatgaaacagacacacctgcacagttggaaatggaggatgaagatacaattgatgtgttccaacagcagacgggaggtgtctactgaaaagggaacctgcttctttactccagaactctgttctttaaagaccaagattacattctcaattagaaaactgcaatttggttccaccacatcctgactactaccgtatagttttctctattctttcatttcccccttccccattcctttattgtacataaagtaactggtatatgtgcacaagcatattgcatttttttttttttttaactaaacagccaatggtatgttttgattgacatcaagtggagacgggatggggaaaaatactgattctgtgaaaataccccctttctccattagtggcatgctcattcagctcttatctttatattccagtaagttattttgctctcactgttttaacaaaaaaaaaaaacaacaacataaaaatccttgcataccttgttcaattggagaattttaatgtttttcatttatcattgtaaaaccaaggacaattttataacttttttgtacgtagctgttacatgtagggcaatctgtctttaagtagggataaattactctaaaacaaaaaagaatcctagatagttttcccttcaagtcaagcgtcttgttgtttaaataaacttcttgtttaaaatgaaaaaaaaaaaa

SEQ ID NO: 71 - DNA, 2072 bp, Homo sapiens
  CDS (339)..(1547)
gcgaaaactcgcctctgcccaaggctgtgcggggcgtccgcccccgcacttcgctgattggccgcactagcccgctcgtcacgctcttttgtctcagctggcagaggataaaagccgccgcggctgccttaggaacggcgctgcctcgtctctgctacccctggttgggcggccctgcgaagcagctccttcgggcagccccgggtcgcttagcggccaaggaggcttcagttctttgccgcctgcaaggcggagaccagaaggcggaatccacagctggcgacgcgggagcatctgctgtccaccagcggagcacagataccctatcgtcgtcagtcatggctagcatcattgcacgtgtcggtaacagccggcggctgaatgcacccttgccgccttgggcccattccatgctgaggtccctggggagaagtctcggtcctataatggccagcatggcagacagaaacatgaagttgttctcggggagggtggtgccagcccaaggggaagaaacctttgaaaactggctgacccaagtcaatggcgtcctgccagattggaatatgtctgaggaggaaaagctcaagcgcttgatgaaaacccttaggggccctgcccgcgaggtcatgcgtgtgcttcaggcgaccaaccctaacctaagtgtggcagatttcttgcgagccatgaaattggtgtttggggagtctgaaagcagtgtgactgcccatggtaaattttttaacaccctacaagctcaaggggagaaagcctccctttatgtgatccgtttagaggtgcagctccagaacgctattcaggcaggcattatagctgagaaagatgcaaaccggactcgcttgcagcagctccttttaggcggtgagctgagtagggacctccgactcagacttaaggattttctcaggatgtatgcaaatgagcaggagcggcttcccaactttctggagttaatcagaatggtaagggaggaagaggattgggatgatgcttttattaaacggaagcgtccaaaaaggtctgagtcaatggtggagagggcagtcagccctgtggcatttcagggctccccaccgatagtgatcggcagtgctgactgcaatgtgatagagatagatgataccctcgacgactccgatgaggatgtgatcctggtggagtctcaggaccctccacttccatcctggggtgcccctcccctcagagacagggccagacctcaggatgaagtgctggtcattgattccccccacaattccagggctcagtttccttccaccagtggtggttctggctataagaataacggtcctggggagatgcgtagagccaggaagcgaaaacacacaatccgctgttcgtattgtggtgaggaaggccactcaaaagaaacctgtgacaacgagagtgacaaggcccaggtttttgagaatttgatcatcactctccaggagctgacccatactgagatggagaggtcaagagtggcccctggcgaatacaatgacttctctgagccactgtaagggaccacccccaggtttcagtgaacccttacctatattcagcatccagtagtgggaaaactggggtgggggtggggtgggacttctaactgcatgaattaatccacaaagcggctatcttttggggtggagtagaaagggtcttggataccagcccattggagggagatagcctgacctctgtccttgctccttctccctgcagcctacgggtctgttttctgtgtgtgcccatttccttgacagctttattctttgtgaaagtggtataatttattgttaaatatttgaacaataaaaaaggtacaaaaagtgaagtacaaattacccaaatctctccacccttatataatcattgtcaaccctttgatgagtgatatttccctatacctatgtacccagatagatatatgcatagataaaagtgatgaaatataagtgctgttctatctgtattttttcaccaaacaatatatgttgtgagcttctatgtcaataaatatatatatcagcaaaaaaaaaaaa

SEQ ID NO: 72 - DNA, 2274 bp, Homo sapiens
  CDS (30)..(1646)
aaaggccctccgaggctacggtggttgggatggcgtacctgagcgagtgtcgcctgcgactggagaaaggctttatcttggacggggtggctgtgagcaccgctgcccgcgcttatgggcgctctaggcccaagctgtggtcggcgattccgccctacaacgcgcaggaggactaccacgcccgcagctacttccagagtcacgtggttccgccccttttgcggaaaactgatcagagtctcaggacacttgtggattgcgtgttcagcatggggaatgcaagtgactacgcctggttggcatcccataccacacccaggggaatggggaagccaagagggcattctctccagcaggtgactgggcatgaccactacaatgctgatctgaaaccgatcgatgggttcaatggaagagagtctgggacatcaggcaacgtggcgacccgaagcagccaaaatgagacctcgacagcaaaggcctcgacagcggagcccggacctttgcaaaatctgcaagtaacgccaacgtcacaaagcgcgaccgagccctgtacgtcatcgttccgcgacgccgacgcgatgtgtgagagattattggaagaaaaccttgccattgttgaagacatcttgccctcacacgcctgccttgggtatggaaggaatctgaagaagagctggcacccgcagaccctcaggaatgtggagaaagtgtggaaggccgagcagaagcatgaggctgagcggaagaagattgaggagcttcagcgggagctgcgagaagagagagcccgggaagagatgcagcgctatgcggaggatgttggggccgtcaagaaaaaagaagaaaagttggactggatgtaccagggtcctggtgggatggtgaaccgtgacgagtacctgctggggcgccccattgacaaatatgtttttgagaagatggaggagaaggaggcaggctgctcttctgaaacaggacttctcccaggctctatctttgccccatcaggtgccaattcccttcttgacatggccagcaagatccgggaggacccactcttcatcatcaggaagaaggaggaggagaaaaaacgagaggtattaaataatccagtgaaaatgaagaaaatcaaagaattgttgcaaatgagtctggaaaaaaaggagaagaagaaaaagaaggagaagaaaaagaagcacaagaaacataagcacagaagctcgagtagtgatcgttccagcagcgaggatgagcacagtgcagggaggcacaactctaaggtgaacaggagagagacaggccaaactaggagcccatcacctaaaaaagaggtctaccaaaggcgacatgctcccggatacaccagaaaactctctgcagaggaattagagcgaaaacggcaagagatgatggaaaacgccaaatggagggaggaggagagactgaacatcctcaagaggcatgctaaggatgaggaacgggagcagaggctagagaagctggactcccgggatgggaagttcatccaccgcatgaagctggagagtgcatctacttcctccctggaggatcgggtgaagcggaatatctactctttacagagaacttcggtagctctggagaagaactttatgaaaagatgaaaactgtcccctctcttattggttttcctgcattttccagggaagctgctgaccccttaattctctttataagagttcaaatgacttctttcacagatgtcaaaccaccagtgttcaaagtgaccctgcttcattgagtcctgaaacagctcacttcctttgagagctagtgtgacttgctttgtgggacactcagtaactttgggttttgactctttaacgggtgggcactggaccatctcggtgggagtgcttgtgccactctggaaggctgttccctggggttgtgatgtttatcatgccacttccttcttacctgtgccaacagacctatttcactgcctcagcgtacaccagacccttcagaaacctctctggtgtcacccagatagattgtgcttactgagacaaatgaacgtttacttgatttagaagataatgtgacagaatgatgtcaggttaggtcaaagccaagggagtgacagaatctggaaaatcaaacaatacaaaaagccctaaatgaactgttaactatttgatctttggatgtaaaattgtaatgcgtatatgtacaaatgtacaatttttacatgcttttaaaaaaggttagctttgtgaaaaaaaaaaa

SEQ ID NO: 73 - DNA, 2266 bp, Homo sapiens
  CDS (30)..(1274)
aaaggccctccgaggctacggtggttgggatggcgtacctgagcgagtgtcgcctgcgactggagaaaggctttatcttggacggggtggctgtgagcaccgctgcccgcgcttatgggcgctctaggcccaagctgtggtcggcgattccgccctacaacgcgcaggaggactaccacgcccgcagctacttccagagtcacgtggttccgccccttttgcggaaaactgatcagagtctcaggacacttgtggattgcgtgttcagcatggggaatgcaagtgactacgcctggttggcatcccataccacacccaggggaatggggaagccaagagggcattctctccagcaggtgactgggcatgaccactacaatgctgatctgaaaccgatcgatgggttcaatggaagagagtctgggacatcaggcaacgtggcgacccgaagcagccaaaatgagacctcgacagcaaaggcctcgacagcggagcccggacctttgcaaaatctgcaagtaacgccaacgtcacaaagcgcgaccgagccctgtacgtcatcgttccgcgacgccgacgcgatgtgtgagagattattggaagaaaaccttgccattgttgaagacatcttgccctcacacgcctgccttgggtatggaaggaatctgaagaagagctggcacccgcagaccctcaggaatgtggagaaagtgtggaaggccgagcagaagcatgaggctgagcggaagaagattgaggagcttcagcgggagctgcgagaagagagagcccgggaagagatgcagcgctatgcggaggatgttggggccgtcaagaaaaaagaagaaaagttggactggatgtaccagggtcctggtgggatggtgaaccgtgacgagtacctgctggggcgccccattgacaaatatgtttttgagaagatggaggagaaggaggcaggctgctcttctgaaacaggacttctcccaggctctatctttgccccatcaggtgccaattcccttcttgacatggccagcaagatccgggaggacccactcttcatcatcaggaagaaggaggaggagaaaaaacgagaggtattaaataatccagtgaaaatgaagaaaatcaaagaattgttgcaaatgagtctggaaaaaaaggagaagaagaaaaagaaggagaagaaaaagaagcacaagaaacataagcacagaagctcgagtagtgatcgttccagcagcgaggatgagcacagtgcacaactctaaggtgaacaggagagagacaggccaaactaggagcccatcacctaaaaaagaggtctaccaaaggcgacatgctcccggatacaccagaaaactctctgcagaggaattagagcgaaaacggcaagagatgatggaaaacgccaaatggagggaggaggagagactgaacatcctcaagaggcatgctaaggatgaggaacgggagcagaggctagagaagctggactcccgggatgggaagttcatccaccgcatgaagctggagagtgcatctacttcctccctggaggatcgggtgaagcggaatatctactctttacagagaacttcggtagctctggagaagaactttatgaaaagatgaaaactgtcccctctcttattggttttcctgcattttccagggaagctgctgaccccttaattctctttataagagttcaaatgacttctttcacagatgtcaaaccaccagtgttcaaagtgaccctgcttcattgagtcctgaaacagctcacttcctttgagagctagtgtgacttgctttgtgggacactcagtaactttgggttttgactctttaacgggtgggcactggaccatctcggtgggagtgcttgtgccactctggaaggctgttccctggggttgtgatgtttatcatgccacttccttcttacctgtgccaacagacctatttcactgcctcagcgtacaccagacccttcagaaacctctctggtgtcacccagatagattgtgcttactgagacaaatgaacgtttacttgatttagaagataatgtgacagaatgatgtcaggttaggtcaaagccaagggagtgacagaatctggaaaatcaaacaatacaaaaagccctaaatgaactgttaactatttgatctttggatgtaaaattgtaatgcgtatatgtacaaatgtacaatttttacatgcttttaaaaaaggttagctttgtgaaaaaaaaaaa

SEQ ID NO: 74 - DNA, 2125 bp, Homo sapiens
  CDS (334)..(1983)
gcacgaggtgtcattcctgactgaggctgttgtatctgtcaaaagagaggagaggtagggggcattctgaaaaatgatcactcatggcttgcaggagcaagagccagacaggactttgcaactggcagctttctgagtgcataagacctccacctctagactagctcttcagtcatggttagccccttcagtccattatcctccaatacaatgcccatgccttctggggctttcagctaagttttgtttaaaaaatgtgggttttttttttgccaattcattaaggcttttccctttgttttctcctgctggtggttcagagttaaattcagtatgaataagagagggaaatatacaacactgaatttggaggagaaaatgaaggttctaagtagaattgaagctggacgatcacttaaaagtgtaatggatgaatttggaatcagtaagtcaacattttatgacattaaaaaaaataagaagttaattctggactttgtactgaagcaggacatgccattagtaggggctgagaagagaaagaggacaacgggagccaaatatggtgatgtagatgatgcggtctacatgtggtaccaacagaaacgctcagccggtgttccggtaagaggcgtggagcttcaggctgctgcagagagatttgcacggtgttttgggcgaacagatttcaaagctagcactggttggctttttagatttcgaaatcggcatgcaattgggaaccgaaaaggatgtggggaacaagtcctaagttcagtttctgaaaatgttgagccatttcgacaaaaactgtccatgataatcaaagaggagaaactgtgtctagctcagctatacagtggggatgaaacagacctcttttggaagtcaatgccagaaaattctcaggcaagtaggaaagatatctgcctaccagggaagaaaataaacaaagaaaggttgtctgcctttttatgtgcaaatgcagacggaactcataaattaaagtcaatcattattggaaaatcaaaactgcccaaaagtgtgaaagaggacacaagtacattgcctgtgatatataaacccagtaaagatgtttggttcaccagagaattgttttcagaatggttttttcaaaactttgttcctgaggtccgacattttcaacttaatgttctaagatttcatgacgaggacgtcagggcattgttacttctggacagttgcccggctcatccttcctctgaatccctaaccagtgaggatggtcgaataaaatgtatgttcttcccccataacacttcaaccttgattcaaccaatgaatcaaggtgtgatcttgagctgcaaacggctgtatagatggaagcaacttgaagagagtcttgtaatatttgaagaaagtgatgatgagcaagagaaaggagataaaggagtttccaaaattaaaatctacaatataaaaagtgcaatttttaactgggcaaaaagttgggaagaagtaaaacaaataaccatagcaaatgcatgggaaaatcttctttacaaaaaggaacctgaatatgattttcaaggcttagaacatggggattatagagaaattcttgaaaaatgtggggagttggaaactaagttggatgatgatagggtgtggttaaatggagatgaagaaaagggttgtctcctaaaaaccaaaggtggaataacaaaggaagttgttcaaaaaggaggagaagctgagaagcagactgctgaatttaaattatctgctgtaagagagagtttggactaccttcttgactttgttgatgccacacctgagtttcagagattccacttcacactgaaagagatgcaacaagaaatagtcaagaaacagttccagagtaaaatccattctagaattggtagctttttgaaacctaggcctcataatattaaggactccttcagtgggccttcaacttctggttctaatcattagattttgtgtttaaagatttctgccattatatgatgtaggccagctgtgaattgtcttgttttagcaactgacattattttgtatatcagtgcccatttatataatggttataaaatttacagtttgaaaataaaaaaaaaaa

SEQ ID NO: 75 - DNA, 2214 bp, Homo sapiens
  CDS (1)..(900)
atgggccatgtgagtagtgacgatgggcacagtgatgaggatgagctgaggaaatccctgtctgagctggtggatgacaagttcgggacaggcacgaagaaggtgacgcgaatcctggatggtggcaaccccttcctggatgtcccacaggcgctcagtgccaccacctacaagcacggcgtcctgacccggaagactcacgctgacatggatggcaagaggacgccccgtgggaggcgtggctggaagaaattctacgcagtgctcaaagggaccatcctgtacctgcagaaggtgagagactgccccagagaccttactcacccaggggcctctgactacagcaagaagtccaacgtgctgaagcttaagacagccgactggagggtattcctcttccaggcaccgagcaaggaagaaatgctgtcctggatcctcaggatcaacctggtggcagccattttctctgccccggccttcccagccgctgtcagctccatgaagaagttctgtcggcccctgctgccctcctgcaccacccgcctctgccaggaggagcaactgcggtctcatgagaataagttgaggcagctgactgcggagctggccgaacacaggtgtcacccagtcgagaggggcatcaagtccaaggaggccgaggagtaccggttgaaggagcactatctcaccttcgagaaaagccgttatgagacctatatccacctcctggctatgaaaatcaaagtgggctcagatgatctggagcggattgaggcccggctggccactctggaaggggatgacccttctctccggaagacacattcaagccctgccctcagccagggccatgtgactggcagcaaaaccacaaaggatgccactgggcctgatacttagctgacatggatttgcagaccccagggtgggcagatgtctccagtggggtcagtgagcacaattccagccaggggccacttggaccaagctccagtcagttgatgggcagctagaggggtgcagaaagcctgtgggcccaggagatggagatgccgtttgtggcgttgatctccttgcgtccttgggcatctccgggcatcagaccctctccctggcccttgttttcctctccaccatggagcctcattttgtaggccagttgtgtgcatgctctagacaccacctcgctggagaagctggaagggctgttgtcttcccaggtctttctcttctcatcaagctcctctcctcatcttttttgtgtgtgagggcaggtcttgactctaggtctcagctggaaccccaccctttctcctcctccttcctctgagttgaccagcagcaggtctgccgaccaccagcaccatcctctcctcccagcagcctccagaaccatgcccaggtctcctgcctcacatcacaataatctgggacccaggcttgtgccctttcagtgtaaagctgactccatcacatgtgcatccacttcttttcatccattgagatcacactgcctcctttttatacagacacaaatatacatctataagaataatatatacataaggaacccctgaaagatggttttggaactggaatcagttagaggatgaaatcagataaaggaaaagcctattttggagcttcccctgttaggaaggatggctgcacctggccccctggcattcctgacgctctaggagggaagggggaggcagtgctggcctcccttgccctgtttttccctcttccagctgacctgtgacttatactgctcttaccgatgatacttttggaaaaaatagagcgtgtatgcaccgccccgtttgtcccatggatatcctggggtgtgagtcggatgggaccacggccctgtttatatttgggtctttatgttggtgctgccaggtctctgagctccagaggtggcctcttggacagatctactgctataggaataaaagacactctgtctcgcaaatggccgcttgtcaacaagcccaaagatgcttgtcggaggacggttatggaagcccttaattcttggttgtgggaaaaggtggaatgacaagttattgattgtttttctgtcgctatttctttcatttgtctagtgaatcagaaaggcttagcaaggccacatctgggaagagtggagaaatttgccacttgacgatcacggattagctagcacctttaagccctgcatttctc

SEQ ID NO: 76 - DNA, 1051 bp, Homo sapiens
  CDS (350)..(991)
aactatagggaatttggccctcgaggccaagaattcggcacgaggctcctcttacagatagtgcggcggcccaagcgtcgcgtctacccgggggattacagtaacccggctgtcagtgatgagtcagagtgcgtggtgctgatgctgctgccatttcatcacctttgcgagcgcagcatccatccctccgctctcccggcgcctgggcctacccagcttcgggctcccaggccagcgatgcgctcgcggctgagctagatcctgccgagccgcgctctctgaggcgtcggcggggcgccccctcccgccgtccccggtccgggccaaggagacctgcagagccgcggccatggaggccatctggctgtaccagttccggctcattgtcatcggggattccacagtgggcaagtcctgcctgatccgccgcttcaccgagggtcgctttgcccaggtttctgaccccaccgtgggggtggattttttctcccgcttggtggagatcgagccaggaaaacgcatcaagctccagatctgggataccgcgggtcaagagaggttcagatccatcactcgcgcctactacaggaactcagtaggtggtcttctcttatttgacattaccaaccgcaggtccttccagaatgtccatgagtggttagaagagaccaaagtacacgttcagccctaccaaattgtatttgttctggtgggtcacaagtgtgacctggatacacagaggcaagtgactcgccacgaggccgagaaactggctgctgcatacggcatgaagtacattgaaacgtcagcccgagatgccattaatgtggagaaagccttcacagacctgacaagagacatatatgagctggttaaaaggggggagattacaatccaggagggctgggaaggggtgaagagtggatttgtaccaaatgtggttcactcttcagaagaggttgtcaaatcagagaggagatgtttgtgctagtcagttcttttatttccaaaacatgctctcctacttgaactgaaaagtaaaaaaaaaaaa

SEQ ID NO: 77 - DNA, 1884 bp, Homo sapiens
  CDS (199)..(627)
aaggatccttaattaaattaatcccccctccccgagtggaagccgccgccgcgctcgcagctcgcaggcgccgcgtagccgtcgccaccgccgccagcccgtgcgccctcggcgcgtacccgccgcgctcccatccccgccgccggccaggggcgcgctcggccgccccggacagtgtcccgctgcggctccgcggcgatggccaccaagatcgacaaagaggcttgccgggcggcgtacaacctggtgcgcgacgacggctcggccgtcatctgggtgacttttaaatatgacggctccaccatcgtccccggcgagcagggagcggagtaccagcacttcatccagcagtgcacagatgacgtccggttgtttgccttcgtgcgcttcaccaccggggatgccatgagcaagaggtccaagtttgccctcatcacgtggatcggtgagaacgtcagcgggctgcagcgcgccaaaaccgggacggacaagaccctggtgaaggaggtcgtacagaatttcgctaaggagtttgtgatcagtgatcggaaggagctggaggaagatttcatcaagagcgagctgaagaaggcggggggagccaattacgacgcccagacggagtaaccccagcccccgccacaccaccccttgccaaagtcatctgcctgctccccgggggagaggaccgccggcctcagctactagcccaccagcccaccagggagaagagaagccatgagaggcagcgcccgccaccctgtgtccacagcccccaccttcccgcttcccttagaaccctgccgtgtcctatctcatgacgctcatggaacctctttctttgatcttctttttcttttctccccctcttttttgttctaaagaaaagtcattttgatgcaaggtcctgcctgccatcagatccgaggtgcctcctgcagtgaccccttttcctggcatttctcttccacgcgacgaggtctgcctagtgagatctgcatgacctcacgttgctttccagagcccgggcctattttgccatctcagttttcctggaccctgcttcctgtgtaccactgaggggcagctgggccaggagctgtgcccggtgcctgcagccttcataagcacacacgtccattccctactaaggcccagacctcctggtatctgccccgggctccctcatcccacctccatccggagttgcctaagatgcatgtccagcataggcaggattgctcggtggtgagaaggttaggtccggctcagactgaataagaagagataaaatttgccttaaaacttacctggcagtggctttgctgcacggtctgaaaccacctgttcccaccctcttgaccgaaatttccttgtgacacagagaagggcaaaggtctgagcccagagttgacggagggagtatttcagggttcacttcaggggctcccaaagcgacaagatcgttagggagagaggcccagggtggggactgggaatttaaggagagctgggaacggatcccttaggttcaggaagcttctgtgcaagctgcgaggatggcttgggccgaagggttgctctgcccgccgcgctagctgtgagctgagcaaagccctgggctcacagcaccccaaaagcctgtggcttcagtcctgcgtctgcaccacacaatcaaaaggatcgttttgttttgtttttaaagaaaggtgagattggcttggttcttcatgagcacatttgatatagctctttttctgtttttccttgctcatttcgttttggggaagaaatctgtactgtattgggattgtaaagaacatctctgcactcagacagtttacagaaataaatgttttttttgtttttcagaaaaaaaaaaaa

SEQ ID NO: 78 - DNA, 2318 bp, Homo sapiens
  CDS (133)..(1461)
ttgattaccgtgacgcaagctcgctagcgtttaaacttaagcttggtaccgagctcggatccactagtccagtgtggtggaattcctttgtaaccccgttccggccaagccgcttcagcgggggacgtagccatgaaggaagagaaggagcacaggcctaaggagaagcgagtaaccctgttaacccccgccggggccacaggcagcggtggtgggacctcgggggacagctccaagggggaagataagcaggatcgcaacaaggagaagaaagaagcgctgagcaaggtgcccggtcggccgctggcccgggagagggcgggacgagtccgcagcgcggggaggatggctgggaatggggctgccccctttctttctcaggttctccttctatctcttcgcctgaatggaagtcgcatcatcctggttcatccattcacccgaaatggggagagcccctcccggccaaatcctgggtggggtttgtatcctcatatgtatgccagagcatacatcaactttaaaaaccaagaggacattattttgttcagggatcgctttgatggttatgtattccttgacaataaagctaaaaagacaaccccacttttgagcttcctgaaaaacaagcagagaatgagagaagaaaagagagaagaaaggaggaggagagaaatagaaagaaaaagacaaagagaagaagagaggaggaaatggaaagaagaagagaaacgaaaaaggaaagatatagaaaagctaaagaagatagacagaattccagaaagggacaaattaaaggatgaaccaaagattaaggtacacaggtttctgttacaagctgtgaatcagaaaaatctgctcaagaagccagaaaaaggagatgaaaaagaattggacaaaagagaaaaagccaagaaattggacaaagagaatctcagtgatgaaagagccagtgggcaaagttgtacattgcccaagcgttctgatagcgaacttaaagatgaaaaaccaaagagacctgaagatgagagcggcagagactatagggagagggaacgggaatatgaacgagatcaggagcgcatacttcgagaaagagagaggctgaagcggcaagaagaagagcgccgtaggcagaaggagcgctatgagaaagagaagacttttaagagaaaagaagaagaaatgaaaaaagagaaagacacacttcgggataaaggaaagaaggctgaaagtacagaatcaataggcagctcagaaaaaactgaaaagaaagaagaagtggtcaagagagatcgaataagaaacaaggatcgtccagcgatgcagctttaccaaccaggagctcgaagccgaaatcgactctgtccccctgatgacagcaccaagtctggagattcagcagcagaaaggaagcaggaaagtggtattagccatagaaaagaaggaggagaggagtgataagtccagatggccttaggtgtcctgactgtctaggcagccaaagagcacacgttaagcaatccagaggtgccttcagggcaaagaatagagagaaagggagccgctgtgctggtggggtacactgcagaggagtaagtcttgtgtcaaagcaggaatctgatcagaggttcagaattggaagtacaatttcattgcttttgcaatttctacaaattaattttaaagtgtcagaaaaaggtgacggcaaggacatgcattgcaatttgcagggggaattgtcaagtgaggacttcatcacatatgacacgagagaaaagtaagagctggttctaaaatcaaaagctgttgttcatcctgaattgaattttctgaatttgggtggagcagagtcgctttgaagccttgttccgatctaattctattgtattgttgatgataagtgttgacattgggtagtgtagaagcaacaagcatgtccttgtagtacaggtacagtgaaggatagaacacactttcgttgatacaaaaatttaaatagttatgttacttctgtatccagtgtcctaaagttttaggattagttttagttttttgtttgcttatatgagcttagcgtaaagaatatttttaaacttcgtgttttgtcatcagcatcttttctattaagaggtaaaatgtagtccttgtttgactcttgacaatccagtgtgtttgatcttaggtctcatgatctgagtgcataccctctccaggaaggaaactgcaccagtgtctattcctgttaaatagcaacttttagtctcagcttgtttcgttttgatgtcaataaatagtaacagcataaaaaaaaaaaa

SEQ ID NO: 79 - DNA, 1453 bp, Homo sapiens
  CDS (128)..(958)
gggctgatgtatataactatctattcgatgatgaagataccccaccaaacccaaaaaaagagatctctcgaggatccgaattcgcggccgcgtcgacggaaaatgttttgtatatagtaatggactcatggatcatctatgtgtctgtgaagagggaggcaacaaactatggtataagaagccaggaaatttccagggaacattggatgcattttttaaaatcattcgaaatgagggcattaaatctctatggagtggccttcctcctaccctagtgatggcagttcctgccacagttatttattttacctgctatgatcaattaagtgctcttctgagatctaagttaggagaaaatgaaacctgcataccaattgttgctggaattgtagccagatttggtgcagtaactgtgataagtccactagaattgattagaaccaagatgcagtccaagaagttttcttacgtggaactgcatcgatttgtcagcaagaaagtatctgaagatggttggatttccctttggaggggctgggctcctactgttcttagagatgtacctttctcagcaatgtactggtataactatgaaattttaaagaagtggttatgtgagaaatctggtttatatgagccaacatttatgatcaactttacttcaggggcattgtctggttcttttgctgctgttgcaactttaccatttgatgtagtaaaaacacaaaagcagacacaactttggacatatgaaagtcataaaatttctatgcctttgcatatgtcaacctggattataatgaagaacattgttgctaaaaatggattttccggattattttcaggcctaattcctcgcttaattaaaattgctcctgcttgtgccattatgatcagtacatatgaatttggaaaggcttttttccagaaacaaaatgttcgaaggcagcaatactagtgatgctgtttcaacttgaaacaacaactatagccaaagaagatggagactcttaggcaagaatgtttttcaccattattctctcacaatgattttatgtctttctttcctataatttaaataaataatttcagctctacctctaaatcataattttaaaataaattttatcttatttttggtgatattgaaaaagatattctagaaatcaccaccattgagcattcttgtaaaaatagattactccttagcatcaaaagcagtctcttgaaagtttaatattatatgtttcagtgtaacataatcttactgggagtgtgttgaatacaccagaactttttgaattgtgtgctgaatgatgtacatagtctagaagaaaaaagcccaagtcttgtgcacatttaaatcgtgtacataagtatttccgtatttcagtaaagtagataaagcactcgttaaatagcattgtttacatcgaccaaaaaaaaaaaaaaa

SEQ ID NO: 80 - DNA, 833 bp, Homo sapiens
  CDS (50)..(754)
gcagtgaatatggtatagaagcttaactatagaagagctatgacgtcgcatgcacgcgtacgtaagcttggatcctctagagcggcgcctactactactaaattcgcggccgtgcgaccgggccgagacccggagccgggccaaggatgacatcaagaaggtgatggcgaccatcgagaaggtccggagatgggagaagcgatgggtgactgtgggcgacacttcccttcgtatcttcaagtgggtgccagtggtggatccccaggaggaggagcgaaggcgggcaggtggcggggcagagagatcccgtggccgggaacgtcggggcaggggcgccagtccccgagggggtggccctctcatcctgctggatcttaatgatgagaacagcaaccagagtttccattcggaaggttccctgcaaaagggcacagagcccagtcctgggggcaccccccagcccagccgccctgtgtcacctgccggacccccagaaggggtccctgaggaggctcagcccccacggctgggccaagagagagatcccgggggcataactgctggcagcaccgacgaacccccaatgctgaccaaggaggagcctgttccagaactgctggaagctgaggcccccgaagcttaccctgtctttgagccagtgccacctgtccctgaggcagcccagggtgacacagaggactcggagggtgcccccccactcaagcgcatctgcccaaatgcccctgacccctgagaagccggcctgcctgtcctgttgccccaggggcccctttggctttttacaaataaagacccttttgtaaaaaaaaaaa

SEQ ID NO: 81 - DNA, 4073 bp, Homo sapiens
  CDS (213)..(3140)
cgcagccaaataatgagggtcaatcctgcgttgaccagtgaaaaagctttacttatacgctgacccagggaggaacgaatagaaccctgttgtatcctggctagcgtttaaacttaagcttggtaccgagctcgtatccactagtccagtgtggtggaattcgctggaatctctgcacgggccttggaaaacgactgtcttcttctgccaaaatgtcaggaattggaaataaaagagcagctggagaacctgtcacctccatgcctcctgagaagaaggcagctgttgaagattcagggaccacagtggaaacaattaagctaggaggtgtctcttcaacggaggaactagacattagaacactgcaaaccaaaaatcgcaagctggcagaaatgttggatcagcggcaggccattgaagatgaacttcgtgagcacattgaaaaactggaacgacgacaggccactgatgatgcctcactattgattgtcaaccgatactggagtcagtttgatgaaaacatccgtatcatccttaaacgttatgatctggagcagggcttgggagacctactcacagaacgaaaagcccttgttgtgcctgaaccagaaccagactctgatagcaatcaggagcgtaaagatgaccgagagagaggggaagggcaagagccagctttctctttccttgctactttggccagcagttccagtgaagagatggagtctcagctgcaggaacgtgtggagtcttcccgccgagccgtgtcccagattgtgactgtttatgataaattgcaagaaaaagtggagctcttatcccggaagctaaacagtggagataatctgatagtggaggaagcagtgcaggagctgaactctttcctcgcacaggagaatatgaggctacaggaattgacagatcttcttcaggaaaagcatcgcaccatgtctcaggagttctccaagttgcagagtaaagtggagacagccgaatcacgagtgtctgtcctggagtccatgattgatgacctgcagtgggatattgacaaaattcgaaagagggaacagcgactcaaccgacacttagcagaagtcctagaacgggtgaattccaaaggttataaggtgtatggagcggggagcagtctgtatggcggcacaatcactatcaatgctcggaagtttgaggaaatgaatgcagagcttgaggagaacaaagagttggctcagaaccgtctctgtgagctggagaaacttcggcaagactttgaggaggtcactacacaaaatgaaaagctgaaggtggaattgcggagtgcagtggagcaagtcgttaaggaaactccagaatatcgctgcatgcagtcacagttctccgtcttgtataatgagagcctacagttgaaagcacacttggatgaggctcggaccctgcttcatggcaccagaggaacccaccagcaccaggttgagcttattgagcgagatgaggttagtcttcataagaagctgaggactgaagtaattcagctagaagatacattggcccaggtccgcaaggagtatgaaatgctgaggatagaatttgagcagacccttgctgccaatgaacaagcaggccctataaacagggagatgcgccacctcatcagtagcctccagaatcacaatcaccagctgaaaggggaggtcctgagatataagcggaaattgagagaagcccagtctgacctgaacaagacacgcctgcgtagtggtagtgccctcctgcagtcccagtctagtactgaggacccgaaggatgagcctgcggagctaaaaccagattctgaggacttatcctcccagtcctcagcttcaaaggcatctcaggaggatgccaatgaaatcaagtctaaacgggatgaagaagaacgagaacgagaaaggagggagaaggagagggaacgagaaagagaacgggagaaggagaaggagagagaacgagagaagcagaagctaaaagagtcagaaaaagagagagattctgctaaggataaagagaaaggcaaacatgatgatggacggaaaaaggaagcagaaattatcaaacaattgaagattgaactcaagaaggcacaggagagccaaaaggagatgaaactattgctggatatgtaccgttctgccccaaaggaacagagagacaaagttcagctgatggcagctgagaagaagtctaaggcagagttggaagatctaaggcaaagactcaaggatctggaagataaagagaagaaagagaacaagaaaatggctgatgaggatgccttgaggaagatccgggcagtggaggagcagatagaatacctacagaagaagctagccatggccaagcaggaagaagaagcactcctctctgaaatggatgtcacaggccaggcctttgaagacatgcaggagcaaaatatccgtttgatgcagcaattgcgggagaaggatgatgcaaatttcaagctcatgtcagagcgtatcaagtccaatcagatccataagttgcttaaagaagagaaggaggagctggcagaccaggtgttgactctgaagactcaggttgatgcccagctacaggtagtaaggaaactggaagagaaggagcatctgttacagagcaacattggcacaggggagaaagagctgggtcttaggacccaagccttagagatgaataaacgcaaggcaatggaggcagcccagcttgcagatgacctcaaagcacaactggagttggctcagaagaagctacatgattttcaggatgagatcgtggagaacagtgttaccaaagaaaaggacatgttcaatttcaaacgagcccaggaggacatctctagacttcgcaggaagctggagaccacaaagaaaccagacaatgtacccaagtgtgatgagattctgatggaagagattaaggattacaaggcacgcttgacctgtccgtgctgtaacatgcgtaaaaaggatgctgttcttactaagtgttttcatgtcttctgctttgagtgtgtgaagacacgctatgacacccgccagcgcaaatgtcccaagtgtaatgctgcttttggtgccaatgattttcatcgcatctacattggttgatctaagtcaagagaagaagaggagctggctagtcaggaacttattcattaaccaccaaacctctacctcttctctccttgactgtcacctgtaggacagtttatcagtcaactacctttcctccagactttacttccaggctctcctcttcagtagctggatgactttagcagaaaggactggtaaatacaagccttgggtttcagaatgaattagaaacaaataactcttactgtcttccctcccagctttgtttattttgtgcttttagacttttcagtgttttctttttccagcccactgtataaacttggattgtccattcctcctgaagaaatcaagttggtatttttgatgtggaaaagggaacaaaagtggaaacatggctacttttggggagtgatattttaaaaaataagttgtctatgggcacaaagttttcttcatttgtgtagcaaacttcttgtgaatgtggattacaaaatggtataattgtgctactctcccctgggtggtttgcagccctaatgaaattatgtctaggatgattcagtctatttcccatttactagcagagtaacttgttaagatcagctggctttcttgttaaagttatttaagttttgaatgctctactacttcaagtctttaaatttcttgagactagaataattttaaataatatgaccctttgtcttctaatgaaataaagattgaagaggttgagtcaggactgagctggtgaagaaatcttgtgggtattctggaaatttgatacggagagaacttggtgagctatgaattactctcagtctcctttttacagggttgttgtgatccctcttttccagaaaattctgtggaatgtttctgtaggactttgttctccacaagcttgaattaaagcaggattcagtttgcaaaaaaaaaaaa

SEQ ID NO: 82 - DNA, 1702 bp, Homo sapiens
  CDS (347)..(622)
cctgttcacggattttcaagcaagtttctagagcatgtgtacgtccttcccattcagattttttatgagccaccattatgtcaatctgtttcatgagctcctgtagttctgcttcacaagatgtcaaaaatcccccaccatgccctcgattttgtattccttctaacaaagcctccatcaccaaatcccctttgttttggcaaccacatccgggaatccgaggaaagcgagtgcagacacgtgatgcgggggagggcggggcgtggcaggagcaagcgtctgccgcggtggccgggtgccggtaagggtttccagcgcccccggcctaggttttggaggcgcgggaatgcgttcgttgctcagtgtcggacttccccctattcccatcggccgaggctgtcactttacgctcataaccgtttttctttactgcactcgtgtcgggaggaaagggacttgcgtggcacccccagacctccccgtctccgcttccacgtttggtacatcctgcctgaggcaggaagccgcagctgagggacggcctgtcgtacgatttgacaagatcaaagctgcaggaaaatggacagtgaggttcagagaggtggaaggatcttggatttgattgatgatgcttggcgagaagacaagctgccttatgaggatgtcgcaataccactgaatgagcttcctgaacctgaacaagacaatggtggcaccacagaatctgtcaaagaacaagaaatgaagtggacagacttagccttacagtacctccatgggaatgttccccccattggaaactgacgcttggctcctttcttgtggatggattttctcaaagtacacagataaagcatggtttgtttcagtctccaaattcaaacctttgagtaataaatcagcactcaaaaatgtacacccatttagtttgtggtagcaaagtgcaatgccgaaattgaatgagaaactgagatttctcagtaatggtgaatatttcgctctttaaacctaaaactcttcattgagtagcttatatttgaacatgattggttaaacatttgcctctacctctgattttgctttgctgtcaaagtttaacaccttccaactacttatgtgtgtcctgtaacacaggtgattgaacgtatgagagggaaaggcaaagaaaaaggaagccagacactaggagaattattaacttctcatacttccccacattgagaagcattcggagtgtatttagcctgtagatgttgtgatatgcaaatatcccattccctggttactggcattcctaagattcttcatggtattttcaaactttggataaatttacagattagaaagatatctgacagttaatctctgttctccttacaaattccttttgtgctgctggaaaggatctttggctaggtggatgactagttttattcaaagccttttctcaaagccctttcagttacaaccaccccactatggaatcagtatttagttatacatttgtataagaacctgtattttgaaaaacacattcatgtatatttattcctggaattatttgcctgttaaacagtgtctttcatgttctctccccagattgtaaactctgtaagaagctgcttgtatctgtatcccttgttgaaactctgaaaacactgaataactaaaatctcttctcatccttttaaaaaaaaaaaaa

SEQ ID NO: 83 - DNA, 780 bp, Homo sapiens
  CDS (158)..(562)
  misc_feature (1)...(780): n = a,t,c or g
aatggtatggcagacccaancatggtatgcgagacccaagctggctagcgtttaaacttaagcttggtaccgagctcggatccactagtccagtgtggtggaattcggcgcttgcgcggagaactcagcgctgagattgtctaaagccccaggaaaaatggtggaaaattcaccgtcgccattgccagaaagagcgatttatggctttgttcttttcttaagctcccaatttggcttcatactttacctcgtgtgggcctttattcctgaatcttggctaaactctttaggtttaacctattggcctcaaaaatattgggcagttgcattacctgtctacctccttattgctatagtaattggctacgtgctcttgtttgggattaacatgatgagtacctctccactcgactccatccatacaatcacagataactatgcaaaaaatcaacagcagaagaaataccaagaggaggccattccagccttaagagatatttctattagtgaagtaaaccaaatgttctttcttgcagccaaagaactttacaccaaaaactgaactgtgtgtaaccatagtaacaccaagcacgtatttatttataagtttttgccattataattttgaccataaattaatttgaccatctctcttattaatagagaagtaaaaaatgtaacttgaccttctcttagattatgttcaatgaatattgtaaatgttcaagtattgttaatgaatagaataaatacaatattgcattcccataaaaaaaaaaa

SEQ ID NO: 84 - DNA, 1737 bp, Homo sapiens
  CDS (226)..(1587)
gcaggtaccggtccggaattcccgggtcgacccacgcgccccacgcgtccggcagttcctcccggtgtcggaggccgattcgccgtgtggcgggttcgggtcccgcctcctgactctggcctctagtccctgagtcccgggcgggctgcattcgtcggggaaacctctcctcgaccaggggcacctctactcgaccaggggcgacggcgtactttgggcttcatcatggaggactacctgcagggttgtcgagctgctctgcaggagtcccgacctctacatgttgtgctgggaaatgaagcctgtgatttggactccacagtgtctgctcttgccctggctttttacctagcaaagacaactgaggctgaggaagtctttgtgccagttttaaatataaaacgttctgaactacctctgcgaggtgacattgtcttctttcttcagaaggttcatattccagagagtatcttgatttttcgggatgagattgacctccatgcattataccaggctggccaactcaccctcatccttgtcgaccatcatatcttatccaaaagtgacacagccctagaggaggcagtagcagaggtgctagaccatcgacccatcgagccgaaacactgccctccctgccatgtttcagttgagctggtggggtcctgtgctaccctggtgaccgagagaatcctgcagggggcaccagagatcttggacaggcaaactgcagcccttctgcatggaaccatcatcctggactgtgtcaacatggaccttaaaattggaaaggcaaccccaaaggacagcaaatatgtggagaaactagaggcccttttcccagacctacccaagagaaatgatatatttgattccctacaaaaggcaaagtttgatgtatcaggactgaccactgagcagatgctgagaaaagaccagaagactatctatagacaaggcgtcaaggtggccattagtgcaatatatatggatttggaggcctttctgcagaggtctaacctccttgcagatctccatgctttctgccaggctcacagctatgatgtcctggttgccatgactatctttttcaacactcacaatgagccagtgcggcagttggctattttctgtccccatgtggcactccaaacaacgatctgtgaagtcctggaacgctcccactctccacccctgaagctgacccctgcctcaagtacccaccctaacctccatgcctatcttcaaggcaacacccaggtctctcgaaagaaacttctgcccctgctccaggaagccctgtcagcatattttgactccatgaagatcccttcaggacagcctgagacagcagatgtgtccagggagcaagtggacaaggaattggacagggcaagtaactccctgatttctggactgagtcaagatgaggaggaccctccgctgcccccgacgcccatgaacagcttggtggatgagtgccctctagatcaggggctgcctaaactctctgctgaggccgtcttcgagaagtgcagtcagatctcactgtcacagtctaccacagcctccctgtccaagaagtgactgttgagaggcgaggaggtagtgggtgaggctacctgactcacttcaaatgcatgttttgagatgtttggagattcagcaattctgtcttcattgctccaggatctggtatactgttctcataaaactgagaggagaaaaaaaaaaaaa

SEQ ID NO: 85 - DNA, 894 bp, Homo sapiens
  CDS (175)..(552)
catcgaagtacgatgatcaaactatctattcgatgatgaagataccccaccaaacccaaaaaaagagatctctcgaggatccgaattcgcggccgcgtcgaccgactacagaaacgctatgtattagaggaagctgagcaactggagcctcgagttaatgctctggaagaggacatggatgatgtggagtccagtgaagaggaagaagaggaggatgagaagttggaaagagtgccatcacctgatcaccgccggagaagctaccgagacttggacaagccccgtcgctctcccacactgcgctacaggaggagtaggagccggtctcccagaaggcggagtcgatctcccaaaaggagaagcccctcccctcgccgagaaaggcatcggagcaagagtccaagacgtcaccgcagcaggtcccgagatcggcggcacagatcccgttccaagtccccaggtcatcaccgtagtcacagacacaggagccactcaaagtctcccgaaaggtctaagaagagccacaagaagagccggagagggaatgagtaatggactcagtttggttttagtccacatggcctcctgtggatataaggatatctgtatgtggaaggattaagatctcccccaggcagctataagaatattttagtttttttcttatcaagtttctcaacctttatttttaatgaaggaggtgctgagttttgtatctttttaatcataatcaacatcagtttttgacccaactaaccttgactgtattcaaacttatgagagtataaaggatctggaggttggggatatgactgacaaggaaaggctgtggccacctgatgaccctttccctttttattaaaccggacacacctgtttcccaaaaaaaaaaaa

SEQ ID NO: 86 - DNA, 1350 bp, Homo sapiens
  CDS (1)..(825)
atgccgagggcggagccaagagcgacactgggggagcaggaaaaggcggggcttccgcttggggcatggaggctgtacctcttacgtcacttccgtaaacaaacggagctgcggaggagcgggtcccgggatgtgaccggggctctgcttgtggctgcggcggtggcttctgaggctgtcgggtctttgcgggttgcggaagggggccccaatacccttcttcttcaggtcttaagaagctggccgtggtgcaataaggaacttaaaacaatggaagagcggaaagtgaagaggaggagtcctaagtcttttagtgcccactgtactcaggttgtcaatgccaaaaaaaatgccattccagtgagtaaaagcacagggttttcaaatcctgcatcacagtcaacttcacagcgaccaaagttaaaaagagtgatgaaagaaaagaccaaacctcagggtggagagggcaaaggcgctcagtcaactccgatccagcactccttcctcactgatgtctcagatgttcaggagatggagagagggctgctcagtcttttgaatgatttccactctggaaaacttcaagcatttggaaatgaatgttccattgaacagatggaacatgttcggggaatgcaggagaaattagctcgcttgaatttggagctctatggggagttagaggaacttcctgaggataagagaaaaacagccagtgactccaatctggataggcttctgtcagatttagaagaattgaattcttccatacaaaaactccatttggcagatgcacaagatgttccaaatacttctgctagctaaaatgaaatgtagtttgctttcttgtgatttgaagagaagcagcagtctttacttttccagccaaatccagtagcagaatcatcttccacaacaaggaattaaagtaattaaagtgcaagttcaatgatcgttttcacttactgcttttagtaaatgtgactcgctgtaattcgccataactggaggcctaggccttgttgaaggcttcatcaggaaatgtgacgcagagattgtgctgctgtgcttcatattgttgccttatgggattatacttgaaatgcattgtgctgatgttcttgacagggcggagggatttctctttcctgagctcaccaaacttattccagtgttgatcgcaagctgttgatgcacaggcgtcttgtggcaagcccagcttcagtttatgttagacaatcagtacacatgctggtgtgttttccaatggccagtgataagaaattaaataagtatttgtgagatttgctattttttaataaagtaattgttttaaattaaaaaaaaaaa

SEQ ID NO: 87 - DNA, 3109 bp, Homo sapiens
  CDS (610)..(1482)
ttctttgggttgactggatggatcctttgctccatggtggggattgctgggttcatcatgcagatgcactcaggagtgagtttggctgtgactgggatgtccaagatggcttcactcatgtgtctggtgcctcaggtgggttgtcttcgtgccagagcagaacatgccttgtagttactgccatattctagccaagttactccatttactgttcctttgttcgtttttcgtcgctttcccacgatcacacagatctcaggtccaggaggacgcatcgtctttttagtaacagtgcatgctgtgaggcttgtagagtcgcctctctcttcaggcgcagcagagggcggccgcaatagtacgctcgcgcggcggtggcgggtggtggtccttggaccacgcggtgggcggacagcggcacggcctcccctcccctccggacgcaagccgaagtacgtgagaggagacttccggccactgcgttgtagtcggcccggctgcaaagcgtttttctgcaggctgttttcccaggttccctcggcctgtacctcgcgcactcctcttgctccaggtccttcagtctccgctcgtctcaccgtaggctgtgacgacatgagcaacaaagaaggatcaggagggttcaggaaaaggaagcatgacaatttcccacataaccaaagaagagaagggaaggatgttaattcatcttcacccgtgatgttggcctttaaatcatttcagcaggaacttgatgcaaggcatgacaaatatgagagacttgtgaaacttagtcgggatataactgttgaaagtaaaaggacaatttttctcctccataggattacaagtgctcctgatatggaagatatattgactgaatcagaaattaaattggatggtgtcagacaaaagatattccaggtagcccaagagctatcaggggaagatatgcatcagttccatcgagccattactacaggactacaggaatatgtggaagctgtctcttttcaacacttcatcaaaacacgatcattaattagtatggatgaaattaataaacaattgatatttacgactgaagacaatgggaaagaaaataaaactccctcctctgatgcacaggataagcagtttggtacttggagactgagagtcacacctgtcgattaccttctgggagtggctgacttaactggagaattgatgcggatgtgtattaacagtgtggggaatggggacattgataccccctttgaagtgagccagtttttacgtcaggtttatgatgggttttcattcattggcaacactggaccttacgaggtttctaagaagctgtataccttgaaacaaagtttggccaaagtggagaatgcttgttatgccttgaaagtcagagggtcagaaattccaaaacatatgttggcagatgtgttttcagttaaaacagaaatgatagatcaagaagagggcatttcttagaatctaacgttactcagttactaattcttttgagaactcctaagagaccaatttgtaagacttatttagtatttcatttaactttattgtggcttttacatagaaacatattcagttgtacttgttttaaattgtatacaagctgtacataaaattagccaaatgaatcatttcttatatcttattcatgaaagtttgcatacagatgtttgcatatatgcctttttgaatttttgctggttaacctttatcatttatctttgtaatgtgaacatgcttcagagtgtaccttttgccataacctattttaatttactttttctgaagtttggagtgataatttttagtggaagcaatttgtaatttaagttggtagttatattatatatagaaaagattttttagttaaacttctggacatgagcgtcctgtttaaatttcttgttaatatcgtgccaagcctcaaaaataggcttattccatggaacaagaattaaaaatgaataagctatcaatatataatttaagtacaagtttaggctgggcgtggtggctcacgcctgtaatcccagcactttgggaggccgaggtaggcagatcacgaggtcaagagatcaagaccagcctgaccaacgtggcgaaacctcgtctctactagaaatacaaaaattagctggatatggtggtatgtgcctgtaatcccagctacttgggaggctgaggcaggagactcgcttgaacctgggaggcagaggttgcagtgagccgagattgcgccactgcactccagcctgggtaacagagcaagactccatctcaaaaaaaagaaagaaagaaaaaaagaaagtacaagtttataaagtattatagtgaaaaattcgcattctggctgattttaagccatttaaaatttatataaaacaaccttccataaaaatttgacaggtgcccagatgttgctttctccatttattttttgtttttttttaatcacagtaggtctgatagagaattggagctaaattataatatttttgttggtaaagttgagttatatacttgtacatacaatggaaatgcttttagtagtgattatttagcaatttttgtttttgttatattaggcatgtttggaggctttcctattctagcatttaaatttaaattttattaaaattaaataatttaaatctagcatttaaatttaaataatttaagtctagcatttacttttaaataattataatgaagttttgaaatactaagttaatccagacctttagttgtcccatggtgttaataaagttgccaaagaagatgtattatgaacaattcagcaataagacaattgtcaacacagttgagaataacaatggtaatcgttagtaatatttagaattggaatttgcctactgaaatagttatagatgattacttgtgatgtgaaactgaattgagcatgacaaccagacatttccagttggttttgtaagttttgagaatctagatactgggttttattttttgaaagattagctctgtttgtaagggctgattccttgaaaatgtaattttccagaaaaacacctaaagaaaataaaacatggacatgcctaaaaaaaaaaaa

SEQ ID NO: 88 - DNA, 940 bp, Homo sapiens
  CDS (258)..(884)
gcaggtaccggcccggaattcccgggtcgacccacgcgtccggaggaggaagttggctggttgcaccgatctgggggcttcccgggctcgggtaaccggagtgctggtatctaatcgtcgctcaaaagctcctaggtgcgcgggtggatataattcccggcttctcgagaagacactacagcctcaaggaggtatatcccgtgccttacctgactgggggctctgagtccagttgtgttgtcttcaacttagacaccatggaggcacctccagtcaccatgatgcctgtcactgggggcaccattaacatgatggagtacctgttgcagggaagtgttttagatcacagtttggaaagcctcatccaccgccttcgtggtttgtgtgacaacatggaacctgagactttccttgaccatgagatggtattcctccttaagggccagcaagccagcccatttgttctcagggcccgacgctctatggacagggcaggggcaccctggcatctgcgctacctgggacagccagaaatgggagacaagaaccgccatgccctggtgcgaaactgcgtggacattgccacatctgagaacctcaccgacttcttgatggaaatgggcttccgcatggaccatgagtttgttgctaagggacatttgttccgtaagggcatcatgaagattatggtgtacaagattttccgcatcctggtgccagggaacacagacagcactgaggccttgtcactctcctatctcgtggaattaagtgtggtagcacccgctgggcaggacatggtctctgatgacatgaagaacttcgcagaacagctaaaacctctggttcacctagagaaaatagaccccaagaggctcatgtgactaagaggatctgtccacatttggggcctatccttacttgtttgaaaaaaaaaaaa

SEQ ID NO: 89 - DNA, 1099 bp, Homo sapiens
  CDS (140)..(445)
atcgatacctttgaggtactggtccggaattcccgggtcgacccacgcgtccgggggaatacttccaagttgtagtgttgttgttttcagcctgctgctgctgctgctgttgcggctaggggaaccgtcgtggggaaggatggtgtgcgaaaaatgtgaaaagaaacttggtactgttatcactccagatacatggaaagatggtgctaggaataccacagaaagtggtggaagaaagctgaatgaaaataaagctttgacttcaaaaaaagcaagatttgatccatatggaaagaataagttctccacttgtagaatttgtaaaagttctgtgcaccaaccaggttctcattactgccagggctgtgcctacaaaaaaggcatctgtgcgatgtgtggaaaaaaggttttggataccaaaaactacaagcaaacatctgtctagatgtattgatggaatttctggctttctaaatgattttactttctgccttgaattttcaaggcatagatgtcaacttacagaataacatgttttaagataattaagtttaaaccagagaatttgattgttactcattttgctctcatgttctaaacagcaacagtgtaactagtcttttgttgtaaatggttattttccttataagaattttaagaactaagtggcaaattccatgaaaatatttctcagttctgtatgcacttttatttaacattattcatataattctccccccaccactttatttatagatactgcaaaagtgagaaggagataatagatactttgctctgaatttggcatccagagttaacatttctcccctcactcccttgctggtgtcatagttattagaatcagcagcctcttaactaattgcggtttcataggatatataaatgtttcaagccattattgctgaatggttctttagttattaacctagacccaaatcaaagaccagttggatttatgatattttttatttgttcttgcagccaaagtgccagtttctttaatatgtgaccaagaacacaaggagcatccatatggccaaataaatacactgaattttagaaaaacaaaaaaaaaaaa

SEQ ID NO: 90 - DNA, 1542 bp, Homo sapiens
  CDS (80)..(1243)
  misc_feature (1)...(1542): n = a,t,c or g
gttgaaccccttnnntttngaacgcctgcggtaccggtccggaattcccgggtcgacccacgcgtccggcgggcaagccatggcgggaagcgagccgcgcagcggaacaaactcgccgccgccgcccttcagcgactggggccgcctggaggcggccatcctcagcggctggaagaccttctggcagtcagtgagcaaggagagggtggcgcgtacgacctcacgggaggaggtggatgaggcggccagcaccctgacgcggctgccgattgatgtacagctatatattttgtcctttctttcacctcatgatctgtgtcagttgggaagtacaaatcattattggaatgaaactgtaagagatccaattctgtggagatactttttgttgagggatcttccttcttggtcttctgttgactggaagtctcttccagatctagaaatcttaaaaaagcctatatctgaggtcactgatggtgcattttttgactacatggcagtctatagaatgtgctgtccatacacaagaagagcttcaaaatccagccgtcctatgtatggagctgtcacttcttttttacactccctgatcattcagaatgaaccacgatttgctatgtttggaccaggtttggaagaattgaatacctctttggtgttgagcttgatgtcttcagaggaactttgcccaacagctggtttgcctcagaggcagattgatggtattggatcaggagtcaattttcagttgaacaaccaacataaattcaacattctaatcttatattcaactaccagaaaggaaagagatagagcaagggaagagcatacaagtgcagttaacaagatgttcagtcgacacaatgaaggtgatgatcaacaaggaagccggtacagtgtgattccacagattcaaaaagtgtgtgaagttgtagatgggttcatctatgttgcaaatgctgaagctcataaaagacatgaatggcaagatgaattttctcatattatggcaatgacagatccagcctttgggtcttcgggaagaccattgttggttttatcttgtatttctcaaggggatgtaaaaagaatgccctgtttttatttggctcatgagctgcatctgaatcttctaaatcacccatggctggtccaggatacagaggctgaaactctgactggttttttgaatggcattgagtggattcttgaagaagtggaatctaagcgtgcaagatgattctcttttcagatcttgggaactgaaaccatttgaaatttattactaaggtcgtgatgtgaatatttgctcagtcagcccaccttgtcctgcctttttgcagataggctttcatttggacagctataactgctgtgttttttatattatttttactctttaccataaatcaattacaagaaaagagtttcagtcctagtatttagccccaaaatgaacctttaaacatttttttggtaatttttatattttctgtctttttaaaaatattaaattctggaaaaaacaaaaaaaaaaaa

SEQ ID NO: 91 - DNA, 794 bp, Homo sapiens
  CDS (56)..(757)
atggaagtaccactacggccagcgaattgaatttaggtgacactatagaagagctatgacgtcgcatgcacgcgtacgtaagcttggatcctctagagcggcgcctactactactaaattcgcggccggtcgacggctgccgaagatggcggaggtgcaggtcctggtgcttgatggtcgaggccatctcctgggccgcctggcggccatcgtggctaaacaggtactgctgggccggaaggtggtggtcgtacgctgtgaaggcatcaacatttctggcaatttctacagaaacaagttgaagtacctggctttcctccgcaagcggatgaacaccaacccttcccgaggcccctaccacttccgggcccccagccgcatcttctggcggaccgtgcgaggtatgctgccccacaaaaccaagcgaggccaggccgctctggaccgtctcaaggtgtttgacggcatcccaccgccctacgacaagaaaaagcggatggtggttcctgctgccctcaaggtcgtgcgtctgaagcctacaagaaagtttgcctatctggggcgcctggctcacgaggttggctggaagtaccaggcagtgacagccaccctggaggagaagaggaaagagaaagccaagatccactaccggaagaagaaacagctcatgaggctacggaaacaggccgagaagaacgtggagaagaaaattgacaaatacacagaggtcctcaagacccacggactcctggtctgagcccaataaagactgttaattcctcaaaaaaaaaaaa

SEQ ID NO: 92 - DNA, 954 bp, Homo sapiens
  CDS (132)..(599)
atgagcacccctgcagtaccggtccggaattcccgggtcgacccacgcgtccgcgaaagcggccaagtagagctccgtcctgacgcgccgcctcccgtgggctccggccggctaagccgcggcggacaactatgctgaaagccaagatcctcttcgtggggccttgcgagagtggaaaaactgttttggccaactttctgacagaatcttctgacatcactgaatacagcccaacccaaggagtgaggtttgagtcctgctggccggccctgatgaaggatgctcatggagtggtgatcgtcttcaatgctgacatcccaagccaccggaaggaaatggagatgtggtattcctgctttgtccaacagccgtccttacaggacacacagtgtatgctaattgcacaccacaaaccaggctctggagatgataaaggaagcctgtctttgtcgccacccttgaacaagctgaagctggtgcactcaaacctggaagatgaccctgaggagatccggatggaattcataaagtatttaaaaagcataatcaactccatgtctgagagcagagacagggaggagatgtcaattatgacctagccagccttcacctgggactgccacatccccagtgaaatcagcatgtttctcggtgcagatctgaaatcacatccagctcctgatgttttcttctccctctgactgcagaggaagtgttcctacctgcaggaaggcacctgtcacacagggcgttcactcagaccatctgtgctctgccctgagttcagttgagaaaatcctattatcaaatttggatttcctggccccagaacttcccaaagacctgtaaaatggagggatttaccacctcacatatgtccagttaaacagtttgtggacttgtaaccgtcgcagcccaatgatacaacagtagtttaatcacgaaaaaaaaaaa

SEQ ID NO: 93 - DNA, 1165 bp, Homo sapiens
  CDS (728)..(1165)
cactgatggacattgagataactacctattcgatgatgaagataccccaccaaacccaaaaaaagagatctctcgaggatccgaattcgcggccgctttgacctaaccatgagttcttattatatatatgtatatatccaaattaacaaaattgtgtctgaagttgagtaactaataaaaatgaatcttactctttttttctttttttttaagatggagttttgctcttgtcacccaggcgggagtgcaatggcgtgatctcggctcactgcaaccttcgcctcctgggttcaagcgattctcctgcctcagccccccaagtagctgggattacagatgcccgctaccacgcctggctaatttttgcgtacagacggggtttcaccatgttggccaggctggtctcaaactcctgacctcaagtgatctgcccgccttggcctcccaggtccagtgtaaactcgtggtccctgcatctgcagaaaggcacatttcccctctgcagcgcggactgattgcgttctcgctgcgtccagatccagggctcgccggcgacagagccagtctcggggtcccactgtgcggataccggattggtaatccgaggcggagccctaagcgcacacgccattgcgcccggacagcggctgtctcatgctctgcatacagcaagtgcttatatcaattcaggccgaatgtgggacacagtgcatctaccccaaaagcgatgtgtcagaccacggccgcaggggagggtgcgcacgccgcggacgagggctacacacaaagagtagtgggagcgaggcgagggacacctcaacgctacacgggcggggcagagactaagaaccgagcctttcgcagctaccccaaaatggagacctcttggccgcgcggcggagggagcaccccgcctgtagcactggatgcacaagtggagcgcgagtgcgctctagggtctggcgcgcagggcaagcactcgtgcctggctgtgcgggttgtgcttatattttgcattaacgaacattacccccaaacactcacctaccgattacctttcgtgcttcctctccgctcagggggaaccccaacctcctggagagctctgttctttcccagttccagcgactctaactgtaagctctgtgggggcacgagctcatag

SEQ ID NO: 94 - DNA, 1449 bp, Homo sapiens
  CDS (429)..(932)
atccactaatcgagtcactatagggtatagcatggtacgcctgcaggtaccggtccggaattcccgggtctactactactaaattcgcggccgctcgaccgacaggaccgtgtttgttgggaatttagaggcccgagttcgggaagagattctgtacgagctgttccttcagtttcttataggcggggccactaaccaaagtgactatatgcaaagacagagaaggaaagccaaagtcttttggatttgtctgctttaaacacccagaatcggtgtcttatgccatagctttgctgaatggaattcgtttatatggaagaccaattaacgtgcagtatcgatttgggagttctcgctcttctgaaccagctaaccaaagttttgagagctgtgttaagataaattcacacaactacaggaatgaagaaatggtggtgggcagatcttcctttcccatgcagtattttccaattaataatacttctttacctcaagaatattttctctttcagaagatgcagtggcatgtgtataatccagtgctgcagcttccttactatgaaatgacagctccacttcctaatagtgcatccgtgtcttcctcactgaatcatgttccagatcttgaggctggacccagctcatataaatggactcaccaacaaccaagtgactctgacctttatcagatgacagctccacttcctaatagtgcatccgtgtcttcctcactgaatcatgttccagatcttgaggctggacccagctcatataaatggactcgccaacaaccaagtgactctgacctttatcagatgaataaacgaaagagacaaaagcaaacaagtgatagtgatagtagcacagacaacaacagaggcaacgaatgtagccaaaagttccgaaagtctaagaagaagaaaagatactagtattacctacaaatgaaacttacctacactgatcttagttctcttatgaaaaaaaataagatgttatcccatcaaataaacaatgtcatggctatcttgtcttttgaaatatgtagtaataagacttatctctggtttgctgttcaatttttgccttgaacgacaaaagctttctaaaaatagtataatgtaccactttttgtatttgtcatgatatttttgacccattggcaacaaatagactattgtcattttattagtaccaatgatgaaatttcaccaaactattaatcaaaagtcacttattgaacacattgataaagcatcatgttccctttgattatcccctataaccaacactcaactacaaataggctgggattcaatgtggagtggtggatttcctgaaagaaagtagtgcagatatttaaggattgcatattggtcctaatgaggatgtaataaacaggcattagtacccctttcttttagtacctaaatatgttgtttctgagcc

SEQ ID NO: 95 - DNA, 2840 bp, Homo sapiens
  CDS (163)..(1290)
tgaaaatcttgttgattctggggagccgagcgcgcggcgcgagcgtcacgccagacagcggcccgcgcgccttctcctcggcgtcggccgccgccgcctcccagaacctcctcgtgccctcgcgtgccaggcccgcggcggccgaaatccgcggttcacagcatgtccgcctcggcccctgctgcggagggggagggaacccccacccagcccgcgtccgagaaagaacccgaaatgcccggtcccagagaggagagcgaggaggaagaggacgaggacgacgaggaggaggaggaggaggaaaaagaaaagagtctcatcgtggaaggcaagagggaaaagaaaaaagtagagaggttgacaatgcaagtctcttccttacagagagagccatttacaattgcacaaggaaaggggcagaaactttgtgaaattgagaggatacatttttttctaagtaagaagaaaaccgatgaacttagaaatctacacaaactgctttacaacaggccaggcactgtgtcctcattaaagaagaatgtgggtcagttcagtggctttccatttgaaaaaggaagtgtccaatataaaaagaaggaagaaatgttgaaaaaatttagaaatgccatgttaaagagcatctgtgaggttcttgatttggagagatcaggtgtaaatagtgaactagtgaagaggatcttgaatttcttaatgcatccaaagccttctggcaaaccattgccgaaatctaaaaaaacttgtagcaaaggcagtaaaaaggaacggaacagttctggaatggcaaggaaggctaagcgaaccaaatgtcctgaaattctgtcagatgaatctagtagtgatgaagatgaaaagaaaaacaaggaagagtcttcagatgatgaagataaagaaagtgaagaggagccaccaaaaaagacagccaaaagagaaaaacctaaacagaaagctacttctaaaagtaaaaaatctgtgaaaagtgccaatgttaagaaagcagatagcagcaccaccaagaagaatcaaaacagttccaaaaaagaaagtgagtctgaggatagttcagatgatgaacctttaattaaaaagttgaagaaaccccctacagatgaagagttaaaggaaacaataaagaaattactggccagtgctaacttggaagaagtcacaatgaaacagatttgcaaaaaggtctatgaaaattatcctacttatgatttaactgaaagaaaagatttcataaaaacaactgtaaaagagctaatttcttgagatagaggacagagaagatgactcgttcccatagatttgaagatctgatttataccattataccagcaaagagaatgtatttccttttctaaatccttgttaagcaacgttagtagaacttactgctgacctttttatcttgagtgttatgtgaatttgagtttgctgttttaaattgcatttctatgccatttttagtttaaaatcttgcatggcattaattgttccttgcttttatagttgtattttgtacattttggatttctttatataaggtcatagattcttgagctgttgtggtttttagtgcacttaatattagcttgcttaaggcatacttttaatcaagtagaacaaaaactattatcaccaggatttatacatacagagattgtagtatttagtatatgaaatattttgaatacacatctctgtcagtgtgaaaattcagcggcagtgtgtccatcatattaaaaatatacaagctacagttgtccagatcactgaattggaacttttctcctgcatgtgtatatatgtcaaattgtcagcatgacaaaagtgacagatgttatttttgtatttttaaaaaacaattggttgtatataaagtttttttatttcttttgtgcagatcactttttaaactcacataggtaggtatctttatagttgtagactatggaatgtcagtgttcagccaaacagtatgatggaacagtgaaagtcaattcagtgatggcaacactgaaggaacagttaccctgctttgcctcgaaagtgtcatcaatttgtaattttagtattaactctgtaaaagtgtctgtaggtacgttttatattatataaggacagaccaaaaatcaacctatcaaagcttcaaaaactttgggaaagggtgggattaagtacaagcacatttggcttacagtaaatgaactgatttttattaactgcttttgcccatataaaatgctgatatttactggaaacctagccagcttcacgattatgactaaagtaccagattataatgccagaatataatgtgcaggcaatcgtggatgtctctgacaaagtgtgtctcaaaaataatatacttttacattaaagaaatttaatgtttctctggagttggggctcttggctttcagagtttggttaatcagtgttgattctagatgatcaacataatggaccactcctgaatgagacttaattttgtctttcaaatttactgtcttaaatcagtttattaaatctgaattttaaaacatgctgtttatgacacaatgacacatttgttgcaccaattaagtgttgaaaaatatctttgcatcatagaacagaaatatataaaaatatatgttgaatgttaacaggtattttcacaggtttgtttcttgatagttactcagacactagggaaaggtaaatacaagtgaacaaaataagcaactaaatgagacctaataattggccttcgattttaaatatttgttcttataaaccttgtcaataaaaataaatctaaatcaaaaaaaaaaaaa

SEQ ID NO: 96 - DNA, 1258 bp, Homo sapiens
  CDS (111)..(980)
taagcttgcggccgctcctcgcctggctgcagcggcggcagccccagtgctgcccctgtgcggcgcccctttcccgctccgccgcgcactgttgtcatggaggaaccaagatggcggctctggcctacaacctgggcaagcgggagatcaaccactacttcagcgtgaggagcgccaaggtgctggcgctggtggccgtgctgctgctcgcagcgtgccacctcgcctcccgccgctaccgaggcaatgattcgtgtgaataccttctctcaagtggcagatttcttggagagaaagtttggcaacctcacagttgtatgatgcataaatacaaaatcagtgaagcaaagaactgccttgtagataaacatattgcatttattggagattccagaattcgtcaattgttttattcttttgtaaaaataattaatccccaattcaaagaagaaggaaataagcatgaaaacattccttttgaagacaagactgcatcagttaaagtggattttctgtggcatcctgaagttaatggttctatgaaacagtgtatcaaagtgtggactgaggattccattgcaaagccacatgtgattgtagcaggagctgccacatggtccatcaagattcacaatggtagcagtgaagcgctttctcaatataaaatgaacatcacctccatagcaccacttttagaaaaattggcaaagactagtgatgtttattgggtcttacaagatcctgtttatgaagatctattaagtgaaaataggaagatgatcactaatgagaagatagatgcttacaatgaagctgcagtcagtattttgaatagtagcaccagaaattctaaatcaaatgttaagatgttcagtgtttccaaattaattgctcaagaaaccatcatggaatctttggatggcttacatcttcctgaatcgagcagagaaactgtgagaaatttttacatatgtcagtagatggagactataatatcaattgctttaagccataagtcattataacatggttataaataatttgttttattgcagtcttagtaacttgtagttattgtgtataaagatacatctagaaattattttgctttctatcatctagttgaatatatacgtaagagttttggtatactccaagagagaaagaagttagggaagaggggaaattaaacttcatttactgagtgctaatcactgttaatatacattgtctctcagaagcatatatgttctcagcc

SEQ ID NO: 97 - DNA, 1213 bp, Homo sapiens
  CDS (111)..(935)
taagcttgcggccgctcctcgcctggctgcagcggcggcagccccagtgctgcccctgtgcggcgcccctttcccgctccgccgcgcactgttgtcatggaggaaccaagatggcggctctggcctacaacctgggcaagcgggagatcaaccactacttcagcgtgaggagcgccaaggtgctggcgctggtggccgtgctgctgctcgcagcgtgccacctcgcctcccgccgctaccgaggcaatgattcgtgtgaataccttctctcaagtggcagatttcttggagagaaagtttggcaacctcacagttgtatgatgcataaatacaaaatcagtgaagcaaagaactgccttgtagataaacatattgcatttattggagattccagaattcgtcaattgttttattcttttgtaaaaataattaatccccaattcaaagaagaaggaaataaggattttctgtggcatcctgaagttaatggttctatgaaacagtgtatcaaagtgtggactgaggattccattgcaaagccacatgtgattgtagcaggagctgccacatggtccatcaagattcacaatggtagcagtgaagcgctttctcaatataaaatgaacatcacctccatagcaccacttttagaaaaattggcaaagactagtgatgtttattgggtcttacaagatcctgtttatgaagatctattaagtgaaaataggaagatgatcactaatgagaagatagatgcttacaatgaagctgcagtcagtattttgaatagtagcaccagaaattctaaatcaaatgttaagatgttcagtgtttccaaattaattgctcaagaaaccatcatggaatctttggatggcttacatcttcctgaatcgagcagagaaactgtgagaaatttttacatatgtcagtagatggagactataatatcaattgctttaagccataagtcattataacatggttataaataatttgttttattgcagtcttagtaacttgtagttattgtgtataaagatacatctagaaattattttgctttctatcatctagttgaatatatacgtaagagttttggtatactccaagagagaaagaagttagggaagaggggaaattaaacttcatttactgagtgctaatcactgttaatatacattgtctctcagaagcatatatgttctcagcc

SEQ ID NO: 98 - DNA, 1048 bp, Homo sapiens
  CDS (565)..(1017)
  misc_feature (1)...(1048): n = a,t,c or g
attaaaagtttgacccgntcggacccacccgttttccaaaaccgggctcagctcggttagtgggcggggggaaatttcccagaccctaccccttgctttagtcctaaaaacagtggcaaaaacagctgtcggtcgattccggaatttcaccccgttcgcaaagtaagatggagaaagctgcggaagggtaggaagtcagcagccactccggcataagtagatcccagctttgggcggtattttttgccacatcagttgaggggtaaaccagtccctcgcggccttgaggagcaggcccagaaataaagtcttaaggggtccggtggctttggccctagagtgttatcaacacctcccagcccttgggccctttagaagtgtcccccgtgctggccgggacacgttccaagctcgggttagagggtattttccgggacctcgcttttatagcacaacgagggcagagtccattggtctgcgaaaagaanccgcgctaactagtttgtctctacggcggcctcgtagtcactgccgcggcgccttgagtctccgggccgccttgccatggctgcccgtggtgtcatcgctccagttggcgagagtttgcgctacgctgagtacttgcagccctcggccaaacggccagacgccgacgtcgaccagcagggactggtaagaagtttgatagctgtaggactgggtgttgcagctcttgcatttgcaggtcgctacgcatttcggatctggaaacctctagaacaagttatcacagaaactgcaaagaagatttcaactcctagcttttcatcctactataaaggaggatttgaacagaaaatgagtaggcgagaagctggtcttattttaggtgtaagcccatctgctggcaaggctaagattagaacagctcataggagagtcatgattttgaatcacccagataaaggtggatctccttacgtagcagccaaaataaatgaagcaaaagacttgctagaaacaaccaccaaacattgatgcttaaggaccacactgaaggaaaaaaaaa

SEQ ID NO: 99 - DNA, 1233 bp, Homo sapiens
  CDS (1)..(1233)
atgggcgaggggaaacttaaatcatcatcccggggcagccacggcggctccatgcgtgaggctggtgccacgcggtctcccggtgttggcattgtctccaggccttctcctcagttctgcacacagctacaaaacaaaagaacagttgccagcacttggaagaggatgtggatccaaaccaaatggaggacagatactccctctatggacaagatactcatggaagaagtcaagttagaagagcagctgaaggaggctgtggaagaagataagcaagcactggcagatactgagggctcagagcagagcagccaaaaattggtggaggagggaaatatgtatagcattcagggcttctgcaaggactcgttagaggttgcagatgttttggagaaggcaacacagtgtgttccagaagaagaaattaaagacaataaccctcacctgaagaacctctctctatgggaccatctagttgcaggaaaagaaggtcaagactcccagtcattctacattatgtctatggaaaaactgtcttccacaaaactggtccctgctcccccaaaaattggggaccgctgcactcaacacagagagaaaaacaaaaagctcaagtctttacctctcagccctcagccaagatgtctcaccccactctctctgatgcaacaagaagcccctggagaacgtttcagtcccattttgtacttctgtcatgtgctcatcacagtctggttgcctgacctgctgagacctgtgtttgctatccctgcagatgggtggctaccacttaatgttgattgtgatgaaatgccagccgaggcatatgccattcaagctaagggtgctacacttgaccactgcggcagtatagatgagtctgaagaatggtatgggatggatacttacgaatgcactcgagcaggggtctccatccacagggccacagagccagaggtgagcagcaggcccagaactgtttccagtggccctctccaggcccggctctccatccgggccgcgtccagcggtcccaacccctgcctcacgacaaccacgtttggcccagctcctggtagcctttgtaggccccaggctcctcgaaagatcttgataggggaagtcctccttgatgctctgccaagacatgaagtaaccttgccctcctctggagtcccacggtacttcctctgtgtttgtcttgtggattctcagtacctgactcgtctttag

SEQ ID NO: 100 - DNA, 3746 bp, Homo sapiens
  CDS (9)..(2144)
ggggcagaatgctggatggcccactgttctccgaggggcctgacagcccccgggagctccaggatgaggagtctggcagctgcctctgggtgcagaagtccaagctattggtgatagaagtgaagactatttcctgtcattatagtcgccgcgccccttctcgacagcccatggacttccaggccagccactgggctcgcgggttccagaaccgcacgtgtgggccgcgcccgggatccccacagccgccgccccgccggccctgggcctccagggtgctgcaggaggcgaccaactggcgggcggggcccctggccgaggtccgagctcgggagcaagagaaaaggaaagcggcgtcgcaggagcgggaggccaaggagaccgagcgaaaaaggcgcaaggctggtggggcccgacggagccccccgggtcgaccccgcccggagccccgcaacgcccctcgggtggcccagctggcagggctccctgctcccttgcggccggagcgcctggcgcctgtggggcgagcgccccgtccatccgcgcagccgcagagcgacccagggtcggcgtgggcggggccctggggaggtcggcggcccgggcccccaagctacgaggctcacctgctgctgagaggttctgccgggaccgccccacgacgccgctgggaccggccgccaccctacgtggctccaccttcttacgaaggcccccataggaccttggggactaagagaggccccgggaactctcaggtgcccacttcatcagccccagctgcgactccagccaggacagacggagggcgcacaaagaagaggctggatcctcggatctaccgggacgtcctcggggcttggggtctccgacaggggcaaggtctcttggggggatccccaggctgtggagcggccagagcaaggccagagcccggcaagggggtcgtggagaaaagcctggggctggctgctgctgacctgaacagtggtagcgacagccatccccaagccaaagctacagggagcgcaggcaccgagatagctcctgcggggtctgcaactgcggctccctgtgccccgcatcccgctcccagatccaggcaccacctcaagggctcgagggaagggaaagaaggagaacagatctggtttcccaaatgctggattccctcccctaaaaagcagccgccccgccatagccagacactccccagaccctgggctcccggaggcaccggatggagagaatctctgggtcttggagagggggcaggaccggagaccctggagggttggaaggcgacccgccgtgcccacaccttgccccgcagttcccagggcctgtcccgtggggaaggcgtctttgtcattgacgccacgtgcgtagtgatacgatcccaatatgttccaaccccccgaacccagcaggtgcagcttttgccctctggggtgacacgcgtggtgggggattcccccagccaatcgaagcccggcaaggaggagggtgaaggggccacggtctttccttccccttgtcaaaagcggctgtcgagcagtcgccttttacaccagcccggcgggggccgcgggggcgaagctgagggcgggaggccgggggactccacactggaggagcgcactttccgcatcttggggctcccggcccccgaagtaaacctgcgggacgcccccacgcagccaggtagcccagagcaccaagccttaggcccagcagcttcgggagcccagggcagagccgaggggtcggaagtggcggtggtccagcggcgcgccggccggggctgggcgcggaccccagggccctacgccggggccctgcgagaagccgtgtcccgtatccgccgccacacagcccctgactcggacacggacgaagctgaggagctcagcgtccatagcggctcctctgatggaagcgacacagaagccccgggcgcctcctggcggaatgagaggaccctgcccgaggttggaaacagttcgccagaggaagatgggaagacagcggaactgagcgacagtgtcggggagatcctagatgtcataagccaaaccgaggaggtcctcttcggggtgagggacatcagagggacccaacagggaaataggaagaggcagtgagaggccccttcttgtatttgtgtccccaacgcatccatccttgggtccactggtccccattcttccccacagacttcctttgcttctcttttccttgtatctttacccatacctgttctcatccttgaaatataaatgaaaggaagggaagcatatgcccattaatgattttgtttcaggagaggtgagaatgagcagatttaattaatgtctgttatgttcagggcacaagggtgagctcttcgcaggggctgatgcactgggtgtggagctgagcagagaggcctaaccaggatcaggcaggagggcagggatggtggcagccataggagggcagggtagggtagggcctctgaggaggagggaaaaagtgaaggagaggctttggacctggtgacagagtgatcagatgacagaggggttcttgggagaagaggcataggtccagcaacaaccaacaaagcagaaggagggctcaccttggtgtcacaagtcttggatttcaatcccaactctgccactgagttgctggttgactgaggccagtcactttccctctccaggcctccaggcctcctggtatataaaatgatggtattctaaggtccatccttccgtctctgacattttgagatctttggaaaggactctatctcatcctcccctcgacaagccaagaatgagaattgggaataagtgaacagagtttgagggtttctgggcggcctccgtgtcacccaaagtcatgatcaattcaggagactgcccaaggcttgcagaagaggtaagggagtgaggcactcctatcccagtctcccaggtttggttgagggctccccaaggcagggcaagatagcggccctgtcactgaccctggcctgtggtggtctgagctggggagggaaggacaccaatgaatcagcttgggacctctttaggccttccccttttcctccaccccgatgctccttagtgatgctctgaggcgtggccacgatctccctcccaggtggtatcgcccacctgaaaaaatcctgagaatttctcccatcttggcctcttccagaaaccggccaggcaaggaaagaggccggtcaccagaagccagcaggcgtggggtgtgatactctctatagccactacagggcgcgcgcaggtcgcggatctccccagttgctaatcccggctctgccactcaatcctatccctagttcccgagcgcgggtcccccgccttgcagtctccagccgtgcggggccgggagcaggcctccggcctcccagacttctagagcccgccgggcccatctttgtactcatccaccccagccggcttgggactcagacaccgaagtctttttttttttctctccgatccttggacacctcctctgtctgccatttattagccatgtgaacttggccacatcacttcacctccctgagcctcagtttcctcatctgtcaaatgggggtttataaacacctacctcgcagggttgttgtgaggatttaatgcgataatgtatgtaaagcgccttgcacactgcctggcacacagtaggcgctcaataaatctaagcttccctttaaaaaaaaaaaa

SEQ ID NO: 101 - DNA, 1291 bp, Homo sapiens
  CDS (327)..(932)
atgcctttccctttcgctcctgctccaggctccgcctccgccgtgtccgggctgctcgccccgcccccgctcgccccgcccccgctcgccccgcccccgctcgccccgcccccgctcgccccgcccccgctcgccccgcccccgctcgccccgcccccgctcgccccgcccctggatttgctccctcaaagcggaggtgaggccggactgaggctcttacagtggtccctgctggcccttggtgacgggtcgcgtcagttccgacccggacccgtacgctgctgcgctgacgtggctcctggaagcagggctggcgtagggccgccatgttgcagcaggatagtaatgatgacactgaagatgtttcactgtttgatgcggaagaggagacgactaatagaccaagaaaagccaaaatcagacatccagtagcatcgtttttccacttattctttcgagtcagtgcaatcatcgtctgtcttctctgtgagttgctcagcagcagctttattacctgtatggttacaattatcttgttgttgtcgtgtgacttttgggcagtgaagaatgtcacaggtagactaatggttggcctacgttggtggaatcacattgatgaagatggaaagagccattgggtgtttgaatctagaaaggagtcctctcaagagaataaaactgtgtcagaggctgaatcaagaatcttttggttgggacttattgcctgttcagtactgtgggtgatatttgcctttagtgcactcttctccttcacagtaaagtggctggcggtggttattatgggtgtggtgctacaaggtgccaacctgtatggttacatcaggtgtaaggtgcgcagcagaaagcatttaaccagcatggctacttcatattttggaaagcagtttttaagacaaaacacgtggagatgatcagacttcctgaatagagaaagcttatgtgctttgttacattggggaacaactgaagagattcttgactcaaccttttagagcttagtccatgttgcaacgaggagtgttggctttgtttttccacttaaaaactatttataaaaaggaaaagtagttttcatattaagtttttatttcctttccagcagttggggctagaaagtatgtgttggcactagaaacattgtcaagatttgttctgtggtgtaggtatgcacattccataggtatgcacacggccatgtaatatcagtatatcccaagttaatgaaagtgttcatttacataggcaatggagacctttgcattttgatcca

SEQ ID NO: 102 - DNA, 1522 bp, Homo sapiens
  CDS (663)..(1238)
ttcggtaccggtccggaattcccgggtcgacccacgcgtccgggaacttgctaatctcttttgtcacattcggattgctcctgctgccccacacacactaacccaaccatcttggggtggactccctgccagcccaactgttgtattttcagttcttccagtgtgaatcagttaatattctcgggaacgagggagaggttgatcctatgaggaaatcaaccacagtgaaaaggcttgggccgcttttgttttcacctgcttttgttgaacaaatttgatttccggagtcagtcattttactgtcaagacatttcttcggcattctgcaacagtttccaacatggctagatccatcagaaactgaagccgtggagaacgctctcggggcctttgccacttcttggagtagaagccgacagagagctgtttggaaacttctccttcacacaccagttgaagactaggctttggaggttttcaaagcagacggtgcttggatgggcagggagaagtaacattctgcaaatcgccgtcagaggtcctgaggacacagacctacctggcttgcattccccttgctgaatggcgtgtgctgcagctgcccactgagggctcttttccctgggattctggacttcagagtaggacagcaggctgggaagatgctgagttccatcaagtgcgtgttggtgggcgactctgctgtggggaaaacctctctgttggtgcgcttcacctccgagaccttcccggaggcctacaagcccacagtgtacgagaacacaggggtggacgtcttcatggatggcatccagatcagcctgggcctctgggacacagccggcaatgacgccttcagaagcatccggcccctgtcctaccagcaggcagacgtggtgctgatgtgctactctgtggccaaccataactcattcctgaacttgaagaacaagtggattggtgaaattaggagcaacttgccctgtacccctgtgctggtggtggccacccagactgaccagcgggagatggggccccacagggcctcctgcgtcaatgccatggaagggaagaaactggcccaggatgtcagagccaagggctacctggagtgctcagcccttagcaatcggggagtacagcaggtgtttgagtgcgccgtccgaactgccgtcaaccaggccaggagacgaaacagaaggaggctcttctccatcaatgagtgcaagatcttctaaaccccaagagacttcacacaacacttatgtatgcaccccaaagactaatggggagagggagggccgggaagccaggaaagcttggtgttttctctgggtacaccccaagcagcgtctccttttggatacagttattgatgaggcttggccactggatgttttcactaactacactctacaagtgaactccttgcccaggccagttagaaaatcccttggggaactgtgatgaatattccatctttgattaaaaaagtgaaatagtctccataaaaaaaaaaaaa

SEQ ID NO: 103 - DNA, 1592 bp, Homo sapiens
  CDS (141)..(1382)
accggtccggaattcccgggtcgacgatttcgtgcgccgaccaagggtccattggttgccatagagatcgtcgagcgctgggcctgtgatcgctgaggggcgagcagttgcgaccctgggctcctggggacctgagcgttatgtctttccgcgacctccgcaatttcacagagatgatgagagccctgggataccctcgacatatttctatggaaaatttccgtacacccaattttggacttgtatctgaagtgcttctctggcttgtgaaaagatatgagccccagactgacatcccgcctgacgtggatactgaacaggaccgagttttcttcattaaggcaattgcccagttcatggccaccaaggcacatataaaactcaacactaagaagctttatcaagcagatgggtatgcggtaaaagagctgctgaagatcacatctgtcctttataatgctatgaagaccaaggggatggagggctctgaaatagtagaggaagatgtcaacaagttcaagtttgatcttggctcaaagattgcagatttgaaggcagccaggcagcttgcgtctgaaatcacctccaaaggagcatctctgtatgacttgctcggcatggaagtagagttgagggaaatgagaacagaagccattgccagacctctggaaataaacgagactgaaaaagtgatgagaattgcaataaaagagattttgacacaggttcagaagactaaagacctgctcaataatgtggcctctgatgaagctaatttagaagccaaaatcgaaaagagaaaattagaactggaaagaaatcggaagcgactagagactctgcagagtgtcaggccatgttttatggatgagtatgagaagactgaggaagaattacaaaagcagtatgacacttatctggagaaatttcaaaatctgacttatctggaacaacagcttgaagaccatcataggatggagcaagaaaggtttgaggaagctaaaaacactctctgcctgatacagaacaagctcaaggaggaagagaagcgcctgctcaagagtggaagtaacgatgactcggacatagacatccaggaggacgatgaatccgacagtgagttggaagaaaggcggctgcccaagccacagacagccatggagatgctcatgcaaggaagacctggcaaacgcattgtgggcacgatgcaaggtggagactccgatgacaatgaggactcggaggagagtgaaattgacatggaagatgatgatgacgaggatgacgatttggaagacgagagcatttctctctcaccaaccaagcccaatcgaagggtccggaaatctgaacccctggatgagagtgacaatgacttctgacccttttgccaagggaccctggcagattaaaaccctcagacttgtaggtaaatgggaacttagaaggttaggaaggtaacccctgttttgtttactaagctggctggactcatgatcactgaagcaatacttatttctgctttagcctcctatgtttgcattccatgaagcttaaataagaattgaagcaaatccctaaaaaaaaaaaaa

SEQ ID NO: 104 - DNA, 1648 bp, Homo sapiens
  CDS (1)..(1275)
atggaggcagctcagtcatcttctacggcctcatctgcatgtatacactgtggtggatgctacgggcgctccctcaaaaagtactcgtttgagtcgatccgtgaggagagcagctacagcgacatccccgacgtcaagaacgacttcgccttcatgctgcacctcattgaccaatacgacccgctctactccaagcgcttcgccgtcttcctgtcggaggtgagtgagaacaagctgcggcagctgaacctcaacaacgagtggacgctggacaagctccggcagcggctcaccaagaacgcgcaggacaagctggagctgcacctgttcatgctcagtggcatccctgacactgtgtttgacctggtggagctggaggtcctcaagctggagctgatccccgacgtgaccatcccgcccagcattgcccagctcacgggcctcaaggagctgtggctctaccacacagcggccaagattgaagcgcccgcgctggccttcctgcgcgagaacctgcgggcgctgcacatcaagttcaccgacatcaaggagatcccgctgtggatctatagcctgaagacactggaggagctgcacctgacgggcaacctgagcgcggagaacaaccgctacatcgtcatcgacgggctgcgggagctcaaacgcctcaaggtgctgcggctcaagagcaacctaagcaagctgccacaggtggtcacagatgtgggcgtgcacctgcagaagctgtccatcaacaatgagggcaccaagctcatcctgtggtacaaccacatcgcctacatccccatccagatcggcaacctcaccaacctggagcgcctctacctgaaccgcaacaagatcgagaagatccccacccagctcttctactgccgcaagctgcgctacctggacctcagccacaacaacctgaccttcctccctgccgacatcggcctcctgcagaacctccagaacctagccatcacggccaaccggatcgagacgctccctccggagctcttccagtgccggaagctgcgggccctgcacctgggcaacaacgtgctgcagtcactgccctccagggtgggcgagctgaccaacctgacgcagatcgagctgcggggcaaccggctggagtgcctgcctgtggagctgggcgagtgcccactgctcaagcgcagcggcttggtggtggaggaggacctgttcaacacactgccacccgaggtgaaggagcggctgtggagggctgacaaggagcaggcctgagcgaggccggcccagcacagcaagcagcaggaccgctgcccagtcctcaggcccggaggggcaggcctagcttctcccagaactcccggacagccaggacagcctcgtggctgggcaggagcctggggccgcttgtgagtcaggccaaagcgagaggacagtatctgtggggctggccccttttctccctctgagactcacgtcccccagggcaagtgcttgtggaggagagcaagtctcaagagcgcagtatttggataatcagggtctcctccctggaggccagctctgccccaggggctgagctgccaccagaggtcctgggaccctcactttagttcttggcatttatttgtctccatctgccacctgc

SEQ ID NO: 105 - DNA, 2250 bp, Homo sapiens
  CDS (487)..(1689)
agtcctctcggcctctgtgcgctcagttgtttacctaggcgtccgggggaggcacactcgcgggactcgcgggactcggccccggcctcccagctcgcccaggacacgacgctggttctgcgggctctcggagcccagcgcgaatcccccgggctaattcccaagaaccgagaggcagcactgcctggaggctgcccccgcctccgcgcccccgtcctcactttctgaggctgttagcagagagtcccgcgggccggggagaagcgggacgcgggggatggcctcgcagcgccctgtgagcgtcggcagtagtcaggcagccaggcctccttgggcgatcgccctgggtagaggagaggagtttccggggctcgggtccgggtcgccttccaggggaacgagcgcggaagcaagtgggcggcgagaggcggagcaagagacgctggagggcgtggacgcagcgggctttggaaaggccccaagttaatgaggcgtgcgccggctgccgagcgcctcttggagctgggctttcccccgcggtgcgggcgccaggagccgccttttccgctgggtgtcactcgggggtggggaagatggcccattcaaaagcgccgcgagggggcccggccagtgcccttcagtgagcgctcgcaagaggacggcagaggcccggcagctcggagctccgggaccttgtggcgcatcaggacgcggctgtccctctgccgggacccagagccgccgccgccgctctgcctcctgcgtgttagcctcctctgcgcgctccgggcaggcggccgtgggagccgctggggcgaggacggcgcgaggctgctgctgctgcccccggcccgcgcggctggaaacggagaggccgagccaagcggcggcccctcttatgctgggaggatgctggagagtagcggctgcaaagcgctgaaggagggcgtgctggagaagcgcagcgacgggttgttgcagctctggaagaaaaagtgttgcatcctcaccgaggaagggctgctgcttatcccgcccaagcagctgcaacaccagcagcagcagcaacagcagcagcagcagcagcaacaacagcccgggcaggggccggccgagccgtcccaacccagtggccccgctgtcgccagcctcgagccgccggtcaagctcaaggaactgcacttctccaacatgaagaccgtggactgtgtggagcgcaagggcaagtacatgtacttcactgtggtgatggcagagggcaaggagatcgactttcggtgcccgcaagaccagggctggaacgccgagatcacgctgcagatggtgcagtacaagaatcgtcaggccatcctggcggtcaaatccacgcggcagaagcagcagcacctggtccagcagcagcccccctcgcagccgcagccgcagccgcagctccagccccaaccccagcctcagcctcagccgcaaccccagccccaatcacaaccccagcctcagccccaacccaagcctcagccccagcagctccacccgtatccgcatccacatccacatccacactctcatcctcactcgcacccacaccctcacccgcacccgcatccgcaccaaataccgcacccacacccacagccgcactcgcagccgcacgggcaccggcttctccgcagcacctccaactctgcctgaaaggggcagctcccgggcaagacaaggttttgaggacttgaggaagtgggacgagcacatttctattgtcttcacttggatcaaaagcaaaacagtctctccgccccgcaccagatcaagtagtttggacatcaccctactgaaaacttgcgattcttcttagttttctgcatacttttcatcacgatgcaggaaacgatttcgagtcaagaagacttttatttatgaacctttgaaaggatcgtcttgtatggtgaattttctaggagcgatgatgtactgtaattttattttaatgtattttgatttatgattatttattagttttttttaaatgcttgttctaagacatttctgaatgtagaccattttccaaaaaggaaactttattttcaaaaacctaatccgtagtaattcctaatcttggagaataaaaaagggcggtggaggggaaaacattaagaatttattcattatttctcgagtactttcagaaagtctgacactttcattgttgtgccagctggttgaaattaaaactctgatattaaaaaaaaaaaa

SEQ ID NO: 106 - DNA, 4050 bp, Homo sapiens
  CDS (1)..(3819)
atggcccgcaccgtggtgctcatcaccggctgttcctcgggcatcggcctgcacttggccgtacgtctggcttcagatccatcccagagcttcaaagtgtatgccacgttgagggacctgaaaacacagggccggctgtgggaggcggcccgggccctggcatgccctccgggatccctggagacgttgcagctggacgtaagggactcaaaatccgtggccgctgcccgggaacgcgtgactgagggccgcgtggacgtgctggtgtgtaacgcaggcctgggcctgctggggccgctggaggcgctgggggaggacgccgtggcctctgtgctggacgtgaatgtagtagggactgtgcggatgctgcaggccttcctgccagacatgaagaggcgcggttcgggacgcgtgttggtgaccgggagcgtgggaggattgatggggctgcctttcaatgacgtttattgcgccagcaagttcgcgctcgaaggcttatgcgagagtctggcggttctgctgctgccctttggggtccacagcttgagcctgatcgagtgcggcccagtgcacaccgccttcatggagaaggtgttgggcagcccagaggaggtgctggaccgcacggacatccacaccttccaccgcttctaccaatacctcgcccacagcaagcaagtctttcgcgaggcggcgcagaaccctgaggaggtggcggaggtcttcctcaccgctttgcgcgccccgaagccgaccctgcgctacttcaccaccgagcgcttcctgcccctgctgcggatgcgcctggacgaccccagcggctccaactacgtcaccgccatgcaccgggaagtgttcggcgacgttccggcaaaggccgaggctggggccgaggctgggggcggggccgggcctggggcagaggacgaggccgggcgcagtgcgagaccccgcaaacaagcgcatcagaggatctgggtggtgcgagagcctcctacagcagccaggtacacacaaggcctcagtttttccatctgtgaaatgggtacgtggacagacctgtccagtagcctcccatgtgagaatcctcggactgagaggcgggggtccgatcggcatcaaggattcacccactcccagagccttcgggatcagccccaccccatcagcaggacacagcccatgccactggaaatctcgcgagaatcccgcgctgaagcgaagtcgagacgtttgaccttcctccgtttccgtagttccgagttgcggtttctccgcctgggcagcatggccgtattccggtcgggtctcctggtgctgacgacgccgctggcctccctagcccctcgcctggcctccatcctgacctcggcggcccggctggtgaatcacacactctatgttcacctgcagccgggcatgagcctggagggcccggctcagccccagtacagccccgtgcaggccacgtttgaggttcttgatttcatcacgcacctctatgctggcgccgacgtccacaggcacttggacgtcagaatcctactgaccaatatccgaaccaagagcacctttctccctcccctgcccacctcagtccagaatctcgcccacccgccagaagtcgtgttgacagatttccagaccctggatggaagccagtacaacccggtcaaacagcagctagtgcgttacgccaccagctgttacagctgttgtccgcgactggcctcggtgctgctatactccgattatgggataggagaagtgcccgtggagcccctggatgtccccttaccctccacgatcaggccagcttcccccgtggccgggtctccaaagcagccggtgcgtggctactaccgtggcgctgtcggtggcacgtttgaccgcctgcacaacgcccacaaggtgttgctcagtgtcgcgtgcatcctggcccaggagcagcttgtggtgggagtagcagacaaagatctgttgaagagcaagttgctccctgagctgctccaaccttatacagaacgtgtggaacatctgagtgaattcctggtggacatcaagccctccttgacttttgatgtcatccccctgctggacccctatgggcccgctggctctgacccctccctggagttcctggtggtcagcgaggagacctatcgtggggggatggccatcaaccgcttccgccttgagaatgacctggaggaacttgctttgtaccagatccagctgctgaaggacctcagacatacggagaatgaagaggacaaagtcagctcctccagcttccgccagcgaatgttggggaacctgcttcggcctccatatgaaaggccagagctccccacatgtctctatgtaattgggctgactggcatcagtggctctgggaagagctcaatagctcagcgactgaagggcctgggggcgtttgtcattgacagtgaccacctgggtcatcgggcctatgccccaggtggccctgcctaccagcctgtggtggaggcctttggaacagatattctccataaagatggcatcatcaacaggaaggtcctaggcagccgggtgtttgggaataagaagcagctgaagatactcacggacattatgtggccaattatcgcaaagctggcccgagaggagatggatcgggctgtggctgagggaaagcgtgtgtgtgtgattgatgccgctgtgttgcttgaagccggctggcagaacctggtccatgaggtgtggactgctgtcatcccagagactgaggctgtaagacgcattgtggagagggatggcctcagtgaagccgcggctcaaagccggctgcagagccagatgagcgggcagcagcttgtggaacagagccacgtggtgctcagcaccttgtgggagccgcatatcacccaacgccagagcttgcagcctggtggggtcggacgatgtggctgggggcttctctgcccggttcctgacacaccggccagcagtgcaggtccggtggagtatgcctacagcgacaacagcctggaccccgggctttttgtagaaagcacccgcaaggggagtgtagtgtccagagctaatagcatcggttccaccagtgcctcttctgtccccaacacagatgatgaggacagtgattaccaccaggaggcctacaaggagtcctacaaagaccggcggcggcgcgcacacactcaggctgagcagaagaggagggacgccatcaagagaggctatgatgaccttcagaccatcgtccccacttgccagcagcaggacttctccattggctcccaaaagctcagcaaagccatcgttctacaaaagagtatggctagggaaagcactggaggggatggagccaagaggggctgtgaagaggccagtgcctcctacccacccatggctcggccttggtgtggtgattgccatgggatagttggggtctgggccattgactacattcagtttttgcacaaggagaagaaaaagcaggaggaggaggtgtccacgttacgcaaggatgtcaccgccctaaagatcatgaaagtgaactatgagcagattgtgaaggcacaccgggacaacccccatgaaggggaggaccaggtctctgaccaggtcaagttcaacgtgtttcaaggcatcatggattccctgttccagtccttcaatgcctccatctcagtggccagcttccaggagctgtcagcgtgtgtcttcagctggatcgaggagcactgtaagcctcagaccctgcgggagattgtgattggcgtcctgcaccaattgaaaaaccagctttactgaccggttcttggaaacctggagaacagccaacaagaggcccttgaatctctacgtggccactgaactgctgggcccgggagactggactacaacacctcacactggtcagctggtttctacttggtgtttggtttttcccagccccattttatcttcagcggagccgcggtgtttgttttgtgaaagcttctgattaatttattatattgacgataaaactcaaaaaaaaaa

SEQ ID NO: 107 - DNA, 4041 bp, Homo sapiens
  CDS (1)..(3078)
atggcccgcaccgtggtgctcatcaccggctgttcctcgggcatcggcctgcacttggccgtacgtctggcttcagatccatcccagagcttcaaagtgtatgccacgttgagggacctgaaaacacagggccggctgtgggaggcggcccgggccctggcatgccctccgggatccctggagacgttgcagctggacgtaagggactcaaaatccgtggccgctgcccgggaacgcgtgactgagggccgcgtggacgtgctggtgtgtaacgcaggcctgggcctgctggggccgctggaggcgctgggggaggacgccgtggcctctgtgctggacgtgaatgtagtagggactgtgcggatgctgcaggccttcctgccagacatgaagaggcgcggttcgggacgcgtgttggtgaccgggagcgtgggaggattgatggggctgcctttcaatgacgtttattgcgccagcaagttcgcgctcgaaggcttatgcgagagtctggcggttctgctgctgccctttggggtccacagcttgagcctgatcgagtgcggcccagtgcacaccgccttcatggagaaggtgttgggcagcccagaggaggtgctggaccgcacggacatccacaccttccaccgcttctaccaatacctcgcccacagcaagcaagtctttcgcgaggcggcgcagaaccctgaggaggtggcggaggtcttcctcaccgctttgcgcgccccgaagccgaccctgcgctacttcaccaccgagcgcttcctgcccctgctgcggatgcgcctggacgaccccagcggctccaactacgtcaccgccatgcaccgggaagtgttcggcgacgttccggcaaaggccgaggctggggccgaggctgggggcggggccgggcctggggcagaggacgaggccgggcgcagtgcgagaccccgcaaacaagcgcatcagaggatctgggtggtgcgagagcctcctacagcagccaggtacacacaaggcctcagtttttccatctgtgaaatgggtacgtggacagacctgtccagtagcctcccatgtgagaatcctcggactgagaggcgggggtccgatcggcatcaaggattcacccactcccagagccttcgggatcagccccaccccatcagcaggacacagcccatgccactggaaatctcgcgagaatcccgcgctgaagcgaagtcgagacgtttgaccttcctccgtttccgtagttccgagttgcggtttctccgcctgggcagcatggccgtattccggtcgggtctcctggtgctgacgacgccgctggcctccctagcccctcgcctggcctccatcctgacctcggcggcccggctggtgaatcacacactctatgttcacctgcagccgggcatgagcctggagggcccggctcagccccagtacagccccgtgcaggccacgtttgaggttcttgatttcatcacgcacctctatgctggcgccgacgtccacaggcacttggacgtcagaatcctactgaccaatatccgaaccaagagcacctttctccctcccctgcccacctcagtccagaatctcgcccacccgccagaagtcgtgttgacagatttccagaccctggatggaagccagtacaacccggtcaaacagcagctagtgcgttacgccaccagctgttacagctgttgtccgcgactggcctcggtgctgctatactccgattatgggataggagaagtgcccgtggagcccctggatgtccccttaccctccacgatcaggccagcttcccccgtggccgggtctccaaagcagccggtgcgtggctactaccgtggcgctgtcggtggcacgtttgaccgcctgcacaacgcccacaaggtgttgctcagtgtcgcgtgcatcctggcccaggagcagcttgtggtgggagtagcagacaaagatctgttgaagagcaagttgctccctgagctgctccaaccttatacagaacgtgtggaacatctgagtgaattcctggtggacatcaagccctccttgacttttgatgtcatccccctgctggacccctatgggcccgctggctctgacccctccctggagttcctggtggtcagcgaggagacctatcgtggggggatggccatcaaccgcttccgccttgagaatgacctggaggaacttgctttgtaccagatccagctgctgaaggacctcagacatacggagaatgaagaggacaaagtcagctcctccagcttccgccagcgaatgttggggaacctgcttcggcctccatatgaaaggccagagctccccacatgtctctatgtaattgggctgactggcatcagtggctctgggaagagctcaatagctcagcgactgaagggcctgggggcgtttgtcattgacagtgaccacctgggtcatcgggcctatgccccaggtggccctgcctaccagcctgtggtggaggcctttggaacagatattctccataaagatggcatcatcaacaggaaggtcctaggcagccgggtgtttgggaataagaagcagctgaagatactcacggacattatgtggccaattatcgcaaagctggcccgagaggagatggatcgggctgtggctgagggaaagcgtgtgtgtgtgattgatgccgctgtgttgcttgaagccggctggcagaacctggtccatgaggtgtggactgctgtcatcccagagactgaggctgtaagacgcattgtggagagggatggcctcagtgaagccgcggctcaaagccggctgcagagccagatgagcgggcagcagcttgtggaacagagccacgtggtgctcagcaccttgtgggagccgcatatcacccaacgccagagcttgcagcctggtggggtcggacgatgtggctgggggcttctctgcccggttcctgacacaccggccagcagtgcaggtccggtggagtatgcctacactggaccccgggctttttgtagaaagcacccgcaaggggagtgtagtgtccagagctaatagcatcggttccaccagtgcctcttctgtccccaacacagatgatgaggacagtgattaccaccaggaggcctacaaggagtcctacaaagaccggcggcggcgcgcacacactcaggctgagcagaagaggagggacgccatcaagagaggctatgatgaccttcagaccatcgtccccacttgccagcagcaggacttctccattggctcccaaaagctcagcaaagccatcgttctacaaaagagtatggctagggaaagcactggaggggatggagccaagaggggctgtgaagaggccagtgcctcctacccacccatggctcggccttggtgtggtgattgccatgggatagttggggtctgggccattgactacattcagtttttgcacaaggagaagaaaaagcaggaggaggaggtgtccacgttacgcaaggatgtcaccgccctaaagatcatgaaagtgaactatgagcagattgtgaaggcacaccgggacaacccccatgaaggggaggaccaggtctctgaccaggtcaagttcaacgtgtttcaaggcatcatggattccctgttccagtccttcaatgcctccatctcagtggccagcttccaggagctgtcagcgtgtgtcttcagctggatcgaggagcactgtaagcctcagaccctgcgggagattgtgattggcgtcctgcaccaattgaaaaaccagctttactgaccggttcttggaaacctggagaacagccaacaagaggcccttgaatctctacgtggccactgaactgctgggcccgggagactggactacaacacctcacactggtcagctggtttctacttggtgtttggtttttcccagccccattttatcttcagcggagccgcggtgtttgttttgtgaaagcttctgattaatttattatattgacgataaaactcaaaaaaaaaaaa

SEQ ID NO: 108 - DNA, 4041 bp, Homo sapiens
  CDS (1)..(3066)
atggcccgcaccgtggtgctcatcaccggctgttcctcgggcatcggcctgcacttggccgtacgtctggcttcagatccatcccagagcttcaaagtgtatgccacgttgagggacctgaaaacacagggccggctgtgggaggcggcccgggccctggcatgccctccgggatccctggagacgttgcagctggacgtaagggactcaaaatccgtggccgctgcccgggaacgcgtgactgagggccgcgtggacgtgctggtgtgtaacgcaggcctgggcctgctggggccgctggaggcgctgggggaggacgccgtggcctctgtgctggacgtgaatgtagtagggactgtgcggatgctgcaggccttcctgccagacatgaagaggcgcggttcgggacgcgtgttggtgaccgggagcgtgggaggattgatggggctgcctttcaatgacgtttattgcgccagcaagttcgcgctcgaaggcttatgcgagagtctggcggttctgctgctgccctttggggtccacagcttgagcctgatcgagtgcggcccagtgcacaccgccttcatggagaaggtgttgggcagcccagaggaggtgctggaccgcacggacatccacaccttccaccgcttctaccaatacctcgcccacagcaagcaagtctttcgcgaggcggcgcagaaccctgaggaggtggcggaggtcttcctcaccgctttgcgcgccccgaagccgaccctgcgctacttcaccaccgagcgcttcctgcccctgctgcggatgcgcctggacgaccccagcggctccaactacgtcaccgccatgcaccgggaagtgttcggcgacgttccggcaaaggccgaggctggggccgaggctgggggcggggccgggcctggggcagaggacgaggccgggcgcagtgcgagaccccgcaaacaagcgcatcagaggatctgggtggtgcgagagcctcctacagcagccaggtacacacaaggcctcagtttttccatctgtgaaatgggtacgtggacagacctgtccagtagcctcccatgtgagaatcctcggactgagaggcgggggtccgatcggcatcaaggattcacccactcccagagccttcgggatcagccccaccccatcagcaggacacagcccatgccactggaaatctcgcgagaatcccgcgctgaagcgaagtcgagacgtttgaccttcctccgtttccgtagttccgagttgcggtttctccgcctgggcagcatggccgtattccggtcgggtctcctggtgctgacgacgccgctggcctccctagcccctcgcctggcctccatcctgacctcggcggcccggctggtgaatcacacactctatgttcacctgcagccgggcatgagcctggagggcccggctcagccccagtacagccccgtgcaggccacgtttgaggttcttgatttcatcacgcacctctatgctggcgccgacgtccacaggcacttggacgtcagaatcctactgaccaatatccgaaccaagagcacctttctccctcccctgcccacctcagtccagaatctcgcccacccgccagaagtcgtgttgacagatttccagaccctggatggaagccagtacaacccggtcaaacagcagctagtgcgttacgccaccagctgttacagctgttgtccgcgactggcctcggtgctgctatactccgattatgggataggagaagtgcccgtggagcccctggatgtccccttaccctccacgatcaggccagcttcccccgtggccgggtctccaaagcagccggtgcgtggctactaccgtggcgctgtcggtggcacgtttgaccgcctgcacaacgcccacaaggtgttgctcagtgtcgcgtgcatcctggcccaggagcagcttgtggtgggagtagcagacaaagatctgttgaagagcaagttgctccctgagctgctccaaccttatacagaacgtgtggaacatctgagtgaattcctggtggacatcaagccctccttgacttttgatgtcatccccctgctggacccctatgggcccgctggctctgacccctccctggagttcctggtggtcagcgaggagacctatcgtggggggatggccatcaaccgcttccgccttgagaatgacctggaggaacttgctttgtaccagatccagctgctgaaggacctcagacatacggagaatgaagaggacaaagtcagctcctccagcttccgccagcgaatgttggggaacctgcttcggcctccatatgaaaggccagagctccccacatgtctctatgtaattgggctgactggcatcagtggctctgggaagagctcaatagctcagcgactgaagggcctgggggcgtttgtcattgacagtgaccacctgggtcatcgggcctatgccccaggtggccctgcctaccagcctgtggtggaggcctttggaacagatattctccataaagatggcatcatcaacaggaaggtcctaggcagccgggtgtttgggaataagaagcagctgaagatactcacggacattatgtggccaattatcgcaaagctggcccgagaggagatggatcgggctgtggctgagggaaagcgtgtgtgtgtgattgatgccgctgtgttgcttgaagccggctggcagaacctggtccatgaggtgtggactgctgtcatcccagagactgaggctgtaagacgcattgtggagagggatggcctcagtgaagccgcggctcaaagccggctgcagagccagatgagcgggcagcagcttgtggaacagagccacgtggtgctcagcaccttgtgggagccgcatatcacccaacgccagagcttgcagcctggtggggtcggacgatgtggctgggggcttctctgcccggttcctgacacaccggccagcagtgcaggtccggtggagtatgcctacagcgacaacagcctggaccccgggcttttacccgcaaggggagtgtagtgtccagagctaatagcatcggttccaccagtgcctcttctgtccccaacacagatgatgaggacagtgattaccaccaggaggcctacaaggagtcctacaaagaccggcggcggcgcgcacacactcaggctgagcagaagaggagggacgccatcaagagaggctatgatgaccttcagaccatcgtccccacttgccagcagcaggacttctccattggctcccaaaagctcagcaaagccatcgttctacaaaagagtatggctagggaaagcactggaggggatggagccaagaggggctgtgaagaggccagtgcctcctacccacccatggctcggccttggtgtggtgattgccatgggatagttggggtctgggccattgactacattcagtttttgcacaaggagaagaaaaagcaggaggaggaggtgtccacgttacgcaaggatgtcaccgccctaaagatcatgaaagtgaactatgagcagattgtgaaggcacaccgggacaacccccatgaaggggaggaccaggtctctgaccaggtcaagttcaacgtgtttcaaggcatcatggattccctgttccagtccttcaatgcctccatctcagtggccagcttccaggagctgtcagcgtgtgtcttcagctggatcgaggagcactgtaagcctcagaccctgcgggagattgtgattggcgtcctgcaccaattgaaaaaccagctttactgaccggttcttggaaacctggagaacagccaacaagaggcccttgaatctctacgtggccactgaactgctgggcccgggagactggactacaacacctcacactggtcagctggtttctacttggtgtttggtttttcccagccccattttatcttcagcggagccgcggtgtttgttttgtgaaagcttctgattaatttattatattgacgataaaactcaaaaaaaaaaa

SEQ ID NO: 109 - DNA, 4057 bp, Homo sapiens
  CDS (1)..(3141)
atggcccgcaccgtggtgctcatcaccggctgttcctcgggcatcggcctgcacttggccgtacgtctggcttcagatccatcccagagcttcaaagtgtatgccacgttgagggacctgaaaacacagggccggctgtgggaggcggcccgggccctggcatgccctccgggatccctggagacgttgcagctggacgtaagggactcaaaatccgtggccgctgcccgggaacgcgtgactgagggccgcgtggacgtgctggtgtgtaacgcaggcctgggcctgctggggccgctggaggcgctgggggaggacgccgtggcctctgtgctggacgtgaatgtagtagggactgtgcggatgctgcaggccttcctgccagacatgaagaggcgcggttcgggacgcgtgttggtgaccgggagcgtgggaggattgatggggctgcctttcaatgacgtttattgcgccagcaagttcgcgctcgaaggcttatgcgagagtctggcggttctgctgctgccctttggggtccacagcttgagcctgatcgagtgcggcccagtgcacaccgccttcatggagaaggtgttgggcagcccagaggaggtgctggaccgcacggacatccacaccttccaccgcttctaccaatacctcgcccacagcaagcaagtctttcgcgaggcggcgcagaaccctgaggaggtggcggaggtcttcctcaccgctttgcgcgccccgaagccgaccctgcgctacttcaccaccgagcgcttcctgcccctgctgcggatgcgcctggacgaccccagcggctccaactacgtcaccgccatgcaccgggaagtgttcggcgacgttccggcaaaggccgaggctggggccgaggctgggggcggggccgggcctggggcagaggacgaggccgggcgcagtgcgagaccccgcaaacaagcgcatcagaggatctgggtggtgcgagagcctcctacagcagccaggtacacacaaggcctcagtttttccatctgtgaaatgggtacgtggacagacctgtccagtagcctcccatgtgagaatcctcggactgagaggcgggggtccgatcggcatcaaggattcacccactcccagagccttcgggatcagccccaccccatcagcaggacacagcccatgccactggaaatctcgcgagaatcccgcgctgaagcgaagtcgagacgtttgaccttcctccgtttccgtagttccgagttgcggtttctccgcctgggcagcatggccgtattccggtcgggtctcctggtgctgacgacgccgctggcctccctagcccctcgcctggcctccatcctgacctcggcggcccggctggtgaatcacacactctatgttcacctgcagccgggcatgagcctggagggcccggctcagccccagtacagccccgtgcaggccacgtttgaggttcttgatttcatcacgcacctctatgctggcgccgacgtccacaggcacttggacgtcagaatcctactgaccaatatccgaaccaagagcacctttctccctcccctgcccacctcagtccagaatctcgcccacccgccagaagtcgtgttgacagatttccagaccctggatggaagccagtacaacccggtcaaacagcagctagtgcgttacgccaccagctgttacagctgttgtccgcgactggcctcggtgctgctatactccgattatgggataggagaagtgcccgtggagcccctggatgtccccttaccctccacgatcaggccagcttcccccgtggccgggtctccaaagcagccggtgcgtggctactaccgtggcgctgtcggtggcacgtttgaccgcctgcacaacgcccacaaggtgttgctcagtgtcgcgtgcatcctggcccaggagcagcttgtggtgggagtagcagacaaagatctgttgaagagcaagttgctccctgagctgctccaaccttatacagaacgtgtggaacatctgagtgaattcctggtggacatcaagccctccttgacttttgatgtcatccccctgctggacccctatgggcccgctggctctgacccctccctggagttcctggtggtcagcgaggagacctatcgtggggggatggccatcaaccgcttccgccttgagaatgacctggaggaacttgctttgtaccagatccagctgctgaaggacctcagacatacggagaatgaagaggacaaagtcagctcctccagcttccgccagcgaatgttggggaacctgcttcggcctccatatgaaaggccagagctccccacatgtctctatgtaattgggctgactggcatcagtggctctgggaagagctcaatagctcagcgactgaagggcctgggggcgtttgtcattgacagtgaccacctgggtcatcgggcctatgccccaggtggccctgcctaccagcctgtggtggaggcctttggaacagatattctccataaagatggcatcatcaacaggaaggtcctaggcagccgggtgtttgggaataagaagcagctgaagatactcacggacattatgtggccaattatcgcaaagctggcccgagaggagatggatcgggctgtggctgagggaaagcgtgtgtgtgtgattgatgccgctgtgttgcttgaagccggctggcagaacctggtccatgaggtgtggactgctgtcatcccagagactgaggctgtaagacgcattgtggagagggatggcctcagtgaagccgcggctcaaagccggctgcagagccagatgagcgggcagcagcttgtggaacagagccacgtggtgctcagcaccttgtgggagccgcatatcacccaacgccagagcttgcagcctggtggggtcggacgatgtggctgggggcttctctgcccggttcctgacacaccggccagcagtgcaggtccggtggagtatgcctacagcgacaacagcctggaccccgggctttttgtagaaagcacccgcaaggggagtgtagtgtccagagctaatagcatcggttccaccagtgcctcttctgtccccaacactgagcgtagatgatgaggacagtgattaccaccaggaggcctacaaggagtcctacaaagaccggcggcggcgcgcacacactcaggctgagcagaagaggagggacgccatcaagagaggctatgatgaccttcagaccatcgtccccacttgccagcagcaggacttctccattggctcccaaaagctcagcaaagccatcgttctacaaaagagtatggctagggaaagcactggaggggatggagccaagaggggctgtgaagaggccagtgcctcctacccacccatggctcggccttggtgtggtgattgccatgggatagttggggtctgggccattgactacattcagtttttgcacaaggagaagaaaaagcaggaggaggaggtgtccacgttacgcaaggatgtcaccgccctaaagatcatgaaagtgaactatgagcagattgtgaaggcacaccgggacaacccccatgaaggggaggaccaggtctctgaccaggtcaagttcaacgtgtttcaaggcatcatggattccctgttccagtccttcaatgcctccatctcagtggccagcttccaggagctgtcagcgtgtgtcttcagctggatcgaggagcactgtaagcctcagaccctgcgggagattgtgattggcgtcctgcaccaattgaaaaaccagctttactgaccggttcttggaaacctggagaacagccaacaagaggcccttgaatctctacgtggccactgaactgctgggcccgggagactggactacaacacctcacactggtcagctggtttctacttggtgtttggtttttcccagccccattttatcttcagcggagccgcggtgtttgttttgtgaaagcttctgattaatttattatattgacgataaaactcaaaaaaaaaa

SEQ ID NO: 110 - DNA, 3214 bp, Homo sapiens
  CDS (1)..(882)
atgcggctgcacagacttcacgcgcggccgagcgcggtggcctgtgggctcctgctgcttctcctccagggtcactatgaggctcccgcggagggcctgtgctgccggccggtaataacagtaatagcttctggcagcagctggctctcaatgtgtggcgtccttggccaagggggcgcgctgagccctccaaaggggcctcagacaagcatgatgagaaagcctgcctgttttgatggttccaagcttggaaagtttgggaaagaatccaagaacatggcaggttatcaaggcgttatcagctgggacacaaaaggagagaagggcgggaagatgccgcgcgtcgtgcccgaccagagaagcaagttcgagaacgaggagttttttaggaagctgagccgcgagtgtgagattaagtacacgggcttcagggaccggccccacgaggaacgccaggcacgcttccagaacgcctgccgcgacggccgctcggaaatcgcttttgtggccacaggaaccaatctgtctctccagttttttccggccagctggcagggagaacagcgacaaacacctagccgagagtatgtcgacttagaaagagaagcaggcaaggtatatttgaaggctcccatgattctgaatggagtctgtgttatctggaaaggctggattgatctccaaagactggatggtatgggctgtctggagtttgatgaggagcgagcccagcaggaggatgcattagcacaacaggcctttgaagaggctcggagaaggacacgcgaatttgaagatagagacaggtctcatcgggaggaaatggaggtgagagtttcacagctgctggcagtaactggcaagaagacaacaagaccctagtcctggttccaatttaggtggtggtgatgacctcaaacttcgttaattaatagcacagcagatgtgtgctgcccatctttacatacacattgcttctagttggcagaaataattgattaaaagaccagaaactgtgataactggaggtactacggtctatttctcaaccttaggcagtaatagacatcacaaactgccatggttttgcactatgattataatacctgcatttctaattttttaagcatgtagccagtaataatttgaagttttttttctatgcaagcttaccttgttggcattattttagggagttgaaactatcaactgtaaagctccttttcttccactttaatttaaaagttcatgtcatttaaaaacaagtcaagaaattaaaattgtatcagagggttttctctaatcattttttctatttttttttttgtacttctagatgttttggttatacagcttcattttagatgagcattcttattttttgttttgtttgccccatttccttttgtgtttttatagtctatagcattttaaaactgctgatgttgtttgcattatttacaggctaaaaacttagtagcatagagctgtctgccacagccttctgacaaagtttacagttattaaagttgcagtatccttttaaatgctagtaatcagcactcttttttttttttttttttaatagagacagggtctcgcagtgttgcccaggctggtctcgaactcctggcatcaagcgatcctcctgccttagcctcccagagtactgggattacaggctctttctttttaaacataaaagttttaaattggtattaactctgtactctgccctagattgttttagcttctgttctgtaatcatgagtttggttggagatattctccatagatgatcttctactgaaatgcctaaagaagtcacaggctggcttctgttttattcagggatttttttaaaaagtcaatcagaaaagggatactggagcttcttcatgtatgtaacagcatattaaactggagacagtgatgaatcagctacaaaggtaatattgtattaaaatcatgtttaagatagctgcttttatgtgtattttatattgcatgcttttgtaaaaacatgctgggtgatgaaagattagttttagagagaaaatgttcatctgtgcagaggatgcattttcttccattaattctggaaaaaacgttcacagttatatatatggtattttgcaaaaggactattaatagaaccttttgagatgaattaatgtaagaatattttttaaataggcttactgtcaaattgcaactttttttttagatacagagtggaaaacagtgctaagtcatttggcacctccttacaaatatttttcatggtcacatttattaaatgttactacatttctgaatttttgaaaaatgtattttatcattaaatggcattattttaaagggtgaaaaactgacacagtcaattcagaaaatggactgaagtctgaataaggtcattgcatttaaaaagcatataactgtacttgactgatgagggaggtgttactttcattgtatataggtcttatttcataaacagatatcctgtatcaaataaaagtatttgttatatatttgaagttatgcatggaaaggagtgtgtttaaattgttacaaacaataatgcgtcattaaaggccatgctgatcttgcataactataagtactatgaatgaatttggttggttttggtgttgtacagctcacatgtttacacactcagtgccctaatttcccctgagggaatcgctttttaagtgatccttacagtggtgttttatgttactttattacagagctccttggttttttacttctgcacttaaatttttttaaataacatgatgatggtacattttcctctattgtctagctaagggctttcggtccaccagtaaataagatcaaatgctcttaaatgttcctgttaccatcctaatgtaaatactggatttttctgtcatttagcaccatgctgcttctgtctgtcttaatgctggcattaagatcatgagccctttttctccagtagtacaggctttgaaaactacttctattaagttattgatgcaatttgatattttttcataatctatatttaaacaaaattacatcattgcatcatcttttctaaattcatctccattaaaacttgccttaagctaccagattgcttttgccaccattggccatactgtgtgtttgtttgtttaatttactttcacaataaacttctgtgtagtaaaaaaaaaaa

SEQ ID NO: 111 - DNA, 447 bp, Homo sapiens
  CDS (139)..(306)
ggcgccgagctttacgctgggctccctgctgcggacgttcaagcgggtcaggcctctacttttatctacaccgctacccctcaccgctgagggtcataacgcacgggtcccccacggctctgccacctgtagtgctcgatggttccttcatcagcttcaggccaagttcgaagtcactatgtagactggagaatgtggcgcgatgtgaagagacgaaaaatggcctatgaatacgcagatgagaggctacgtattaattcactcaggaagaataccattttgccaaaaattcttcaggttagctaattaagatgagtccctttgtaccacaagatcattaactcaacatcagatcacttttgatactgtttgttgtgacttggtatcaatataatttctggagaataagatccacatcaatataaacaaatagtctttgaactgagg

SEQ ID NO: 112 - DNA, 2005 bp, Homo sapiens
  CDS (224)..(1936)
gtgtctcgtgcctctgctggaccctgactctgggctcctggtcctggcaggaaaggggttcagtcagcaaacggggctcagttcagactcatttcagggcgagaggcagctgtactgttacgaggtggtcccgcagcagccggcgctgagcccagtgacccagtgtgtcctggagagcgtgctgcgtggggctgcccttgtgccccggcaggcgctggccgtcatgagctgcgaggtactccgcgtcctacagctgagcgacacagccatcgtgcccatcggctaccatgtgccccgcaaggctgtggagttccacgaggacctgttcccggacactgccggctgtgtgcctgccaccgacccccatagctggtgggctggggacaaccagcaggtgcagaaggtcagcctcaaccccgcctgccggccccacccgagcttcacttcctgtctggtgccccctgcggagcccctccctgacacagcccagcctgcggtgatggagacacccgtgggtgatgcagacgcaagccctggggccctcactctccagcaccagtggcatcgggaccagccccagtttgaggtcgctgcagagcctgctggttccaagttccgccatgctcagggcactgtcctgcaccgagacagccacatcaccaacctcaaggggctcaacctcaccacacctggtgagagtgacggcttctgtgccaacaagctgcgtgtggccgtgccgctgctcagcagcgggggacaggtggctgtgcttgagctacggaagcctggccgcctgcccgacacggcactgcccacgctgcagaatggggcagctgtgactgatctggcctgggacccctttgacccccatcgcctcgctgtggctggtgaggacgccaggatccgactgtggcgggtacccgcagagggcctggaagaggtgctcaccacgccagagactgtgctcacaggccacacggagaagatctgctccctgcgcttccacccactggcagccaatgtgctggcctcgtcctcctatgacctcactgttcgcatctgggaccttcaggctggagctgatcggctgaagctgcagggccaccaagaccagatcttcagcctggcctggagtcctgatgggcagcagctggccactgtctgcaaggatgggcgtgtgcgggtctacaggccccggagtggccctgagcccctgcaggaaggcccagggcccaagggaggacgcggagctcgcattgtctgggtatgtgatggtcgctgtctgctggtgtctggctttgacagccaaagtgagcgccagctgctcctatatgaagctgaggccctggccggcggacccttggcagtgttgggcctggacgtggctccctcaaccctgctgcccagctacgacccagacactggcctggtgctcctgaccggcaagggcgacacccgtgtattcctgtacgagctgctccccgagtcccctttcttcctggagtgcaacagcttcacgtcgcctgacccccacaagggcctcgtcctcctgcctaagacggagtgcgacgtgcgggaagtggagctgatgcggtgcctgcggctgcgtcagtcctccctggagcctgtggccttccggctgccccgagtccggaaagagttcttccaggatgacgtgttcccagacacggctgtgatctgggagcctgtgctcagtgccgaggcctggctgcaaggcgctaatgggcagccctggcttctcagcctgcagcctcctgacatgagcccaggtgcaccgagggactgggtgtggggaggaagcgggatgggggttggagaaagggacagaaggcccaggttgaagttccattcctgttggcacgcagaatcctctggcctttgggagggtggagtggctgtgtcaatcagtctctgagccagtggagggcagggctcgtggtctgtgttttcatcacaggtccccaccccccccaaaaaaaaaaaa

SEQ ID NO: 113 - DNA, 780 bp, Homo sapiens
  CDS (231)..(509)
ggggtttttcagtatctacgattcatagatctggaattcgcggccgcgtcgacggagagtgtcatggaggcctacgagcaggtccaaaagggacccctgaagctgaaaggcgtcgcaaagctgggagtgaccaagcggtgaggcccgagggcccgcgggattccgtcttcatcccccttagaccttttctcgggacccctggccctgatcctccgacccgccgcctcctcatgtctttttccaggaagaagaaaaagaaggacaaagacaaagcgaaactcctggaagcaatgggaacgagcaaaaagaacgaggaggagaagcggcgcggcctggacaagcggaccccggcccaggcggccttcgagaaaatgcaggagaagcggcaaatggaaaggatcctaaagaaggcatccaaaacccacaagcagagagtggaggacttcaacagacacctggacacactcacggagcattacgacattcccaaagtcagctggacgaagtagccgcctgcccccagtatggagcagcatcgagggttcgcaaaaggccacactggggttgtgtgtgtttcctttggtatattctggaaacatggctacacacacccttgcatcttctgctacagactgcttttcgaagctgtgtaccctcattctggaacttgattaaagtaagatcgtccttgtactcagtttaggcttcttggcaacatacagaagatacacccttttcgtttggatggaaagtttctaagtttatccagaggtaaagcct

SEQ ID NO: 114 - DNA, 867 bp, Homo sapiens
  CDS (93)..(827)
  misc_feature (1)...(867): n = a,t,c or g
caagctggctagcgtttaaacttaagcttggtaccgagctcggatccactagtccagtgtggtggaattccacagctcagagctggtctgccatggacatcctggtcccactcctgcagctgctggtgctgcttcttaccctgcccctgcacctcatggctctgctgggctgctggcagcccctgtgcaaaagctacttcccctacctgatggccgtgctgactcccaagagcaaccgcaagatggagagcaagaaacgggagctcttcagccagataaaggggcttacaggagcctccgggaaagtggccctactggagctgggctgcggaaccggagccaactttcagttctacccaccgggctgcagggtcacctgcctagacccaaatccccactttgagaagttcctgacaaagagcatggctgagaacaggcacctccaatatgagcggtttgtggtggctcctggagaggacatgagacagctggctgatggctccatggatgtggtggtctgcactctggtgctgtgctctgtgcagagcccaaggaaggtcctgcaggaggtccggagagtactgagaccgggaggtgtgctctttttctgggagcatgtggcagaaccatatggaagctgggccttcatgtggcagcaagttttcgagcccacctggaaacacattggggatggctgctgcctcaccagagagacctggaaggatcttgagaacgcccagttctccgaaatccaaatggaacgacagccccctcccttgaagtggctacctgatgggcaccacatcatgggaaaggctgtcaaataatcgacagcgaagtcgacgnnnnaattccggagcggtcgcg

SEQ ID NO: 115 - DNA, 2295 bp, Homo sapiens
  CDS (1)..(2295)
atgacatgtctccgcaccggcaccgagggggcgcagggcggcgtggggagggggacccaggccgggggtccgggtggcgcgccctctctcacccccgaggcggcaggagcagcgcggcgcgaggacacctccgggccgtcggtgcccctgagcttcccggcggcgcgctgccccaggaaagttcccggcctgccgcccctcgggctgttggaaagtttcggcggctgcagggccctggcagctaggcgccaagcgtcgcgcggggcgggcacggctgcggggtcgggccgcgctcggctggagtgctcagtgcaagacgcccggacgggcccagcgcgcaacccgagaccccgggccagccctcccgccctcacgcggcccgtgcgcaaagcggaccgggccggcgacgcgaatctccgccccgccccatctgacagcaaattttcccattggtcgagagacccggcgcggcacggcaaccggcgccgattgggcggatgcgcggagatgacggcttgccattgggcctccgggatgtcagtcccggcggatgaccggccccctcgcggaggggccgcggccccgcacctgcccgaacctctgcggcggcggtggcagggtacgcgggaccgctccctcccagccgacttacgagaacatcccccgaccatccagccccgagcagggactggcagagccggcgccccttccccggactctggccgcgtagcctccgccaccactcccagttcacaggtatccttcttcagcgcctgctactcgctgcgcgctgcgcgccgctccctcctgtcgacatcgaattgtattcttcacgcaagccgcgagagagagttctgctgctatccccattttacagttgggaaacagcctcagagaggttctcacttgcttgaacacagtcgtctgaccctggggcctgggggctctctcatcctcacgcccctgggtccccgcagcggggagacgatggagggagccgcggagtccccgaaggccgctggatcaggaagcgctcagacgcccgcgcagcccgaagctttggcgcagccccgggggcggggcgccaggaggtggcagcctccgagcgacagcgcgcccagccaacgggacgccggcatgcggcgcgccgccccgcccctcgctgcgcggcccaatggtgaacgcgccggcttcgggctgggcggtactgggctggctgcggtggcgcgcgggcgcggcacccggaagtcggcggcggtggcggaggcgacctcgcgacctgtgtcagcagagccgccctgcaccaccatgtgcatcatcttctttaagtttgatcctcgccctgtttccaaaaacgcgtacaggctcatcttggcagccaacagggatgaattctacagccgaccctccaagttagctgacttctgggggaacaacaacgagatcctcagtgggctggacatggaggaaggcaaggaaggaggcacatggctgggcatcagcacacgtggcaagctggcagcactcaccaactacctgcagccgcagctggactggcaggcacgagggcgaggtgaacttgtcacccactttctgaccactgacgtggacagcttgtcctacctgaagaaggtctctatggagggccatctgtacaatggcttcaacctcatagcagccgacctgagcacagcaaagggagacgtcatttgctactatgggaaccgaggggagcctgatcctatcgttttgacgccaggcacctacgggctgagcaacgcgctgctggagactccctggaggaagctgtgctttgggaagcagctcttcctggaggctgtggaacggagccaggcgctgcccaaggatgtgctcatcgccagcctcctggatgtgctcaacaatgaagaggcgcagctgccagacccggccatcgaggaccagggtggggagtacgtgcagcccatgctgagcaagtacgcggctgtgtgcgtgcgctgccctggctacggcaccaggtattgcagcaccgtgggtgcgccacctcctatcccatgtcccacctcccacgctagagggccggcaaagaagccaagtgcccatagccagagccaggcttcttcctcgcctgagtggattccagagcttctgccctgtccagacgcagctgcaggaaccaacactatcatcctggtagatgcggacggccacgtgaccttcactgagcgtagcatgatggacaaggacctctcccactgggagaccagaacctatgagttcacactgcagagctaa

SEQ ID NO: 116 - DNA, 2444 bp, Homo sapiens
  CDS (157)..(1146)
atttggccctcgaggccaagaattcggcacgagtggaggttaaaaaaattacagaaatccttacctgtgttactgagtagcaatactatttattatgtatgtattttaaaggcattaacattttttatttttcaggattaattggaattcttcaaaatgtcaggtgtggtacccacagcccctgaacagcctgcaggtgaaatggaaaatcaaacaaaaccaccagatccaaggcctgatgctcctcctgaatacaattctcattttttaccaagaccccctggaacagctgtccctccacctactggctacccaggaggcttgcctatgggatactacagtccacagcaacccagtaccttccctttgtaccagccagttggtggtatccatcctgtccggtatcagcctggcaaatatcctatgccaaatcagtctgttccaataacatggatgccagggccaactcctatggcaaactgccctcctggtctggaatacttagttcagttggacaacatacatgttcttcagcattttgagcctctggaaatgatgacatgttttgaaactaataatagatatgatattaaaaacaactcagaccagatggtttacgttgtaaccgaagacacagatgactttaccaggaatgcctatcggacactaaggcccttcgtcctccgggtcactgattgtatgggccgagaaatcatgacaatgcagagacccttcagatgcacctgctgttgcttctgttgcccctctgccagacaagagctggaggtgcagtgtcctcctggtgtcaccattggctttgttgcggaacattggaacctgtgcagggcggtgtacagcatccaaaatgagaagaaagaaaatgtgatgagagttcgtgggccatgctcaacctatggctgtggttcagattctgtttttgaggtcaaatcccttgatggcatatccaacatcggcagtattatccggaagtggaatggtttgttatcagcaatggcagatgctgaccattttgacattcacttcccactagacctggatgtgaagatgaaagccatgatttttggagcttgcttcctcattgacttcatgtattttgaaagatctccaccacaacgttcaagatagagagacacagcaagccatcacctatggttaattttgaaaaatggaaaagttggattgggcttacagtcagcactcagttatttgcaagtgtatttctttgctttgtagagtatttttattgggtgttaactttgacagctgagagtgggcttgcaagaacacaatctaaaagtgtgtttcaattgagtatctctctagtagaataggagttcatcctgaaaagctgtgactcattaacccagtaaacatatacaaagtaagcttaaagcactataaacatgagataagggaaaatgaatccagagttctcatattaataggtagtgaaacaataaggctttttagagcagactttgttggcataaaataacctggcttctatccctaaccctttcctacctttcctctccgtcaacatgtcctcatactgaagacaaacttgtttcaatgatagtcttcattttcaaaaacaaaaaggcaggcagacagaaataatgatgttttcttgcactaagaaggtactacttgtacacatatatcaaaacctcattctgcaaagtttttgaaggtttcaatgggaaatttgattttattacaaaataaaacattttttaatgttaaagtttatatattccatgcttgttttctcattcactggcatggatgatcaggagctgcctatatgtgaaggcagaatcagactatcaggaaaggagctggccagggccacagccagtcaagatctctgagcaacttagagacattggtgtcattatatgaagcttgcatttaatacatttatacataatacatttgtacatttaattcataacgtctcttggtcacagatgccttatatataaaataagttgccagatctctaagattgcctagtacacctttgtatctcatttgatgtgatacccagaagagatcattgttttttgtttttgtttttgtttttttcaagaagatccttcgtgatcaccatgctgttctcatggtaagaactggagttatgtttttaaatttggaaatatgacattttatgtagcactttataaaaagtgaaagcgacaaattccaccgctgcttaatactgctttgcttctttttattgacatgatagataaatatgtatctacacagagtaataataataaaacacagtaaacattctatttctctatggtctacagcatgccagtaaataatatgtaggaccaataataaattatcaattacacatttttgtgttaactaattaaaagcatagtgtataagtgaaaaaaaaaaaa

SEQ ID NO: 117 - DNA, 2367 bp, Homo sapiens
  CDS (1729)..(2088)
ttagtccacaggtcgcttttccccatatttctttgtaaactcttcagcattcttacagaattttttacggtccttagagtattcttcagctaggtcagcccgaagcgggtgctcaggctgggggtcattcaccagtgctatgagggactggattacagggtggagcgccgtgtcctccaccgacgtcaatgacgtgctgaggttcacccattcattcacctgcgaatgctgcaccgactggggaccgggctcctcactgttcttggaaaagttcagcttgatcagggacctcccgtccagcttctctccattgctggggttggtcccgtacttcttaagccatggaacaatgttcagtaagtcaaagacgatgccatcgggagtgcagactggcttcttgccaccataaaagtgagtgtattcagcacaggtaatgtacattttgtccttttggtgctgtcgcttccccatggcggagcggcggcggcgaaattgagacctgttgctgttgggcccggagttggccatgctgaggatgccgcggcccgtgtgcgagaggttgggccggaactcgtctttgaagggcttcccccagtatgactccccacccgtgcctgtgcctgtggggtcgcccccttggatcacaaagttccggatggatctgtggaagatggtgccatcgtaataatgcttcttgcaaagcctgatgaagttttcgcaggtttttggtgtctgtgcgcaggccatgctgccaacgcggccccctaggaaggacacagggcactgctgcgggtcccgcctagtgacaggctgaatttccagtggcagccctatatttaagacatggctgtcagatgacccagagatgaccttggggcatggggagtggctggcctccacacccaccaggtcgcagtgcagctccaggttgaggtcgcccttgttggtgtgcagccgcacgtagcccttcttcttcacaaactggtagcgcagcacatcctcgtcgatggcagctgcttcatgtgtggtctccgggaccatcgcggtggaggtgaaggaagcgctgaccttccctgtggaatagtgggcagcattcagcttgtccactttcttcttctccggggccttcatggtggctgccagaatctcgtcccctttgaactccttgtagagctcctgcagggtctctcgggtctcggcatttgtatttttcagataataagacgggtcctgtttggccttctcttcatctgggtctattattttcatgttattcttcacatgatagaagttagagacattgaacttgtccaaattggtggggtcctggagggtgatgatgtcctgccgggagaagggctcgtcggtcagcaggtcccggaagttcttggccttgatatttagctgttccactgcctcataggcgtagacgttgccggtcgtcctcacagccacgatgtgggtgttgttggtgaacacggtaaacagcactgggcagtggtacttccctgcttcacacgcatgttctctctgtaacccaccactttgtctgattggttggcaggttacgtttttctctcgtcccagctgtgtggacagtgccacacgccctcctggacaacgacggctcttgcgtgcattttccagtgttgcttttgtcagagaggccagcagagccacggttcttccagaaccagccctgagctgagtgaggagtgcccaggagagatggtgaaaatgacaaagtccaaaactttccaagcgtatctgccgaactgtcaccgaacgtacagctgtatccactgcagagcacacctggccaatcatgacgagctcatctccaagtcctttcaggggagccagggacgcgcctacctcttcaattccgtggtgaacgtgggctgcggccctgcagaggagagggtccttctcaccgggctgcatgcggttgccgacatctactgcgagaactgcaagaccacgctcgggtggaaatacgagcatgcctttgagagcagtcagaaatataaggaaggaaaattcatcattgagcttgctcatatgatcaaagacaatggctgggagtaatgtgcgaactttcccttctccttcgaatgctgttttgtgaaagaaactgtgaatgtaatggaaacgtaggagcatctggtgacagcctttcttgccctctgacctcaaaggctagctgcgcatagctcttgacactctcggccatctctgtgggtaaggtgtccctcggatctgtcctcttcgtgtacacagttgtttctgaaaattttcaatgagctttttctaacttctcaagttctagagaaagaattaaccaactgatgacttaaaaaaaaaaaa

SEQ ID NO: 118 - DNA, 9870 bp, Homo sapiens
  CDS (3442)..(9390)
atggcacgatcacagctcactgtagtcttgacctcctgggctcaggcgattctcctgcttcagcctctcgaggagctgggcccacaggaactgggtggcatagcaggaggtgagcagcaggcaagccagcattacccgctgagctccgcttcctgtcagatcagaggcaacgctgattctcataggagcacggatcctactgtgaacagcccatgcgaaggatctaggttgtgcggcactcccaagaatctaacgcctgatgatgttcacttatgtagttcccatttgttacttcgacgagcagctgtggcatgtcttcggcaacttgcacaaagagaagcagcggaagtatgtgaatatgccatgagcctggcaaaaaatacaggggacaaagagagcagtagtgccaatgtcagtccttttgcccctggggttagttctcgaactgatatccattgccggcaccaaggtgttaatataacagaaactggtcttgagggacttctttttggaatgctagaccgggagacagatcgaaaattatgttctgatattcatgacactttgggacatatgctttcttcgctggcagtagaaaaactttctcattggctaatgctttgtaaagatgtcctggcagcttctagtgatatgagtactgcaactctcttaagtagtggaaaagatgaagaagctgaaaagaaagatgagatggatgatgataccatgtttaccacgttaggtgaagaagataaatcaaagccctttgtggcccctcgctgggccactcgagtatttgctgccgattgcctgtgtcgaatcatcaatttgtgtgagaatgcagaccaggctcactttgatcttgccttggcacgttctgctaaacttcgaaaccctacaaatgacctcttggtacttcatctctctgacctcattcgcatggcattcatggctgcaactgatcatagcaaccagctgcgaatggctgggctccaggcgcttgaagacattatcaagaagtttgcgtctgtgcctgagccagaatttccaggtcatgtgatactggagcagtatcaggctaatgtgggagctgctctaagaccagccttttcacaagatacaccatcagatataatagcgaaagcttgccaggtatgtagtacatggataggaagtggagttgtcagtgatctcaatgatctccgtcgagtacacaatcttcttgtttcttctctggacaaagttcaggctggaaaaggatcttccagccagctgtaccgagagagtgccacgaccatggaaaaactggctgttctcaaagcttgggcagaggtatatgtggtcgctatgaatattaaaaaggaagcagagtcaaaaccaaaaagagcaattaaaaatactgacgatgatgatgacgactgtggtaccatcgatgaactgccaccagatagtttaataacactggtacaacctgaactaccaacactcagtcgcctgtggttagcagcattaaaagattatgcactcttgactttaccagccgaattttctagtcagcttcctccagatgcaaggagtgatgaggaagtcctcagtgttagtagaggaaacaacaggaggtggagaggaatagcagaagaagaaagaaacagagggaagaaacagagttccctggttgtgatagaaagagaagatgatagggttttaggagccactggcaacaatgaagaggtaaattctgtgacaacaggacctgaggagcccattgaacatgttacagcatgcctgcaggccttacataccttgctagactccccttatgctcgagtccatattgcagaagatcagctgataggtgttgagttgctgagtgttttgcaccgccttctattgacctggaatccatcatctgtccagctgttggttactggagttgtacaacagatagtaagagctgctcaggattatttgcaagagaaaagaaacactctaaatgaagatgatatggaaaaagaggcctgtaccgtattgggagaaggaggtgacagcggtggtctcattcctggaaaatctcttgtgtttgcaactatggagctgctgatgttcattttagtacggcatatgccacatctcagtaccaaggtgtcagactctccaagtcacatagccactaaaactcgactatcagaagaaagtgctcgtttggtggcagccacagttaccatactctctgatttaccatccctttgttcacccgctgagttaccctacatatgtgaaaataatgaattctccatatttggagttttgcaagcagaggctacaatggctgcaggtcagagtggtgaaggatgtatgacaatcctgcccacaattctgttcttaattgcaagaatattgaaagacacagcaataaagtctgcagataatcaggttcctccaccagtcagtgcagctcttcaagggattaaaagtattgtgacactttcaatggccaaaactgaggctggcgttcaaaaacagtggacagctctgattcgtagcacgcttgcttgcatcctggaatattctcaaccagaagactctgtacctacacctgatgaagtaagcatgctaacagcaattgcactcttcctgtggtctgctagtaatgaaataataggagtccagtcattacagaatggctgcatgaacagatttaaaaatgcattaaattcatgcgacccatgggttcaagccaaatgttaccagcttctcctctcagtcttccagcattccaatcgtgccctttcaactccttatattcattcattagctccaatagtggttgaaaagctaaaagctgttgaaagaaacagaccagccagtaacatagagcttttagcggttcaagaaggaataaaagttcttgaaacactggttgctcttggtgaagaacaaaacagagtccagctacttgctcttttagttcccactttgatatcttacctgctggatgaaaattcttttgcctcagcaagttcagcttccaaagatcttcatgagtttgcactccagaatttaatgcatattggacctctgtatccacatgctttcaagacagtaatgggggctgctcctgagttgaaaaggtttccactggttacttggtgtgcgccctatgtaaatgaagaggatgaagtaaagttacaacgtcatttagttggtgtgcgccctatgatttactgcaggaggactgcaaagggaaagaaacttcaacggagcagtttttcagatgggctgtcaacaaaccacaatttggaagcagcagcagaaagctgcggcgttgtcttagaaaggtgatcggcgttccttagaaatgaaaactggtcaggtaacaggtttgagcccctcgagtcaaaagagaaaggcaagagcgacagcgactcgcagattggcagaatggaggagcgtctagggaggctgctccctgctgactggggtgtgggcgggacggcggagggaggaggaggcgctgcttgccgccgctgttgcctccgctgctgggcgccggggcagctccccggtactctgcggccgccatggacgagcaggcgtgtcacggcgtcttcttcagcaacaaccacccgggcgccgcggtgcaaggtgctctgggctctgcggagtgctgccgcggccgcgacgggcgctgcgtggtatgcttcattgcctgatgtccagtgtcttgaaaactgttgtttcatttattttgtcgagttttttggttatctcaggagaggtgaactacagaatgaagctgtatttatgtggactgctgaactagaaaatatagccactctctgctttaaggctttggaaaactcaaattatggggtacgagtggcagtgtctaaacttttaggaacagtcatggccacagcattaatgccaaaacaggcaacagtaatgcgtcagaatgtgaagcgagcaacatttgatgaagtcttagaactcatggccacaggatttctgcgtggagggtcaggtttcttaaagagcggtggagaaatgttaaaagttggagggtccgttaatcgtgaagtgagagttggagttacgcaggcgtatgttgtttttgtgacaacattgggtggtcagtggttggagcgcagctttgccacgttcctgtcccatgtacttgatctggtttcccatcctcgggcaacacaaacacatgtggaggctgtgtactccagacgatgtgtttcctttatcctaagagctactgtgggcagtttgctaggtgaaaaagcccagattgcagctgccaaagaaatctgccaagctattggaaaacaaatgaaagccgtagaagcagtagtgaatgacacaagtggagaaaacaaatttggcgcagcagacattgcagcaagccagcatgtgatggtctgtgccctccaggaactcgggagcctggtgcagagcttgaatgccaccgcatcccctcttattcaagaagcatctatagggcttttggagattgtgacttcagtgctgcttcatccaagcatggctgcccgacttgctgctgcatggtgtttgcgctgtgtggctgtggcattacctttccagctgacaccatttctagacaggtgtgcagaacggctcaacaacttgaagacctcaccagaagctgtcagtggatatagttttgcaatggctgctttgttaggtggagtacatcagtgtcctttgggcattcctcatgccaaaggaaagatggtagttagtattgctgaagatcttttacgaactgctgcccaaaatagcaggctatctttacagcgcacccaagctggctggcttttacttggagcacttatgactttaggaccatctgtcgttcgttaccatctgcccaagatgttgttattgtggcgaaatgttttcccacgttccttaaaggaattggaagctgagaaggcccgaggcgattcttttacctggcaggtaactttggaaggtcgtgctggagctctatgtgccatgaggagcttcgttgcacattgtcctgagctactaactgaagatgtgattcgaaaattgatgacccctattgaatgtgccatgactatgatgtcacacattccatctgtaatgaaagcccatggagctcatctgaaagctagtgctgcaatggtccgtttaagactttatgatatcttggctttgttacctccaaaaacttatgaaggatcttttaatgcacttcttagagaactggtagcggaattcactttgactgacaactcagccaacacaactacttccctcctcagatccctctgccattatgatgatagtgttcttcttggttcttggcttcaggaaactgatcataaatcaattgaagaccagctccagccaaacagtgcctctggaagtggggctctggagcatgatccttcctctatttatttacgcatacctgctggagaagcagtacctggtcccctccctctcggagtctcagtcattgatgcttctgtggccctttttggtgtagtgtttcctcatgtttcttataaacaccgattacaaatgttggatcactttgctgaatgtgttaaacaagctaaaggtgtccgccagcaggctgtgcagcttaacatatttactgctgttcttagtgcactaaagggcttagctgaaaacaaaagtactttaggacctgaggaagttcgtaaatctgccctgacactggttatgggtcctctggacaacccaaaccccatcttacgttgtgcagcgggggaagctcttggaagaatggctcaggtggttggagaagcaacttttattgctagaatggcccaatatagctttgacaagttgaaatcggctcgagatgttgtatctaggactggtcattcattggctcttggttgtttgcatcgttatgttggtggaataggctcaggacaacatctgaagaccagtgtcagcattttattggctctagcacaagatgggacatcccctgaagtccagacttggtctcttcattcacttgctttgatagtggattctagtggtccgatgtatcgtggctatgtggaaccaacattatctctagttcttaccttgctgttgacagttccgccttcacatacagaagttcatcagtgtttgggtcgatgcttgggtgctataataactactgttggccctgaactacaagggaatggagcaacaacttctacaattcgttcctcttgtttggtgggttgtgcaataacacaagaccattcagattctcttgttcaggcagctgccatatcttgccttcagcagcttcacatgtttgcaccacgacatgtcaatctatctagccttgttcctagcctttgtgttcacttatgtagttcccatttgttacttcgacgagcagctgtggcatgtcttcggcaacttgcacaaagagaagcagcggaagtatgtgaatatgccatgagcctggcaaaaaatacaggggacaaagagagcagtagtgccaatgtcagtccttttgcccctggggttagttctcgaactgatatccattgccggcaccaaggtgttaatataacagaaactggtcttgagggacttctttttggaatgctagaccgggagacagatcgaaaattatgttctgatattcatgacactttgggacatatgctttcttcgctggcagtagaaaaactttctcattggctaatgctttgtaaagatgtcctggcagcttctagtgatatgagtactgcaactctcttaagtagtggaaaagatgaagaagctgaaaagaaagatgagatggatgatgataccatgtttaccacgttaggtgaagaagataaatcaaagccctttgtggcccctcgctgggccactcgagtatttgctgccgattgcctgtgtcgaatcatcaatttgtgtgagaatgcagaccaggctcactttgatcttgccttggcacgttctgctaaacttcgaaaccctacaaatgacctcttggtacttcatctctctgacctcattcgcatggcattcatggctgcaactgatcatagcaaccagctgcgaatggctgggctccaggcgcttgaagacattatcaagaagtttgcgtctgtgcctgagccagaatttccaggtcatgtgatactggagcagtatcaggctaatgtgggagctgctctaagaccagccttttcacaagatacaccatcagatataatagcgaaagcttgccaggtatgtagtacatggataggaagtggagttgtcagtgatctcaatgatctccgtcgagtacacaatcttcttgtttcttctctggacaaagttcaggctggaaaaggatcttccagccagctgtaccgagagagtgccacgaccatggaaaaactggctgttctcaaagcttgggcagaggtatatgtggtcgctatgaatattaaaaaggaagcagagtcaaaaccaaaaagagcaattaaaaatactgacgatgatgatgacgactgtggtaccatcgatgaactgccaccagatagtttaataacactggtacaacctgaactaccaacactcagtcgcctgtggttagcagcattaaaagattatgcactcttgactttaccagccgaattttctagtcagcttcctccagatggtggagcattttatacccctgaaactattgatacagctagacttcactatcggaattcctgggccccaattctccatgcggtggcactttggttaaatagcacaggatttacgtgctcagagtctacagaagcagcagcaatatctggtttacaaaaacgttctacatctgtcaatttaaaccaggcatcaggagcagtgggtagtgctaaatctttgccagaaattaacaaagacagaatgcatctgattttaggtgtgagtatacagtttctttgttcccctagacctgaggagcccattgaacatgttacagcatgcctgcaggccttacataccttgctagactccccttatgctcgagtccatattgcagaagatcagctgataggtgttgagttgctgagtgttttgcaccgccttctattgacctggaatccatcatctgtccagctgttggttactggagttgtacaacagatagtaagagctgctcaggattatttgcaagagaaaagaaacactctaaatgaagatgatatggaaaaagaggcctgtaccgtattgggagaaggaggtgacagcggtggtctcattcctggaaaatctcttgtgtttgcaactatggagctgctgatgttcattttagtacggcatatgccacatctcagtaccaaggtgtcagactctccaagtcacatagccactaaaactcgactatcagaagaaagtgctcgtttggtggcagccacagttaccatactctctgatttaccatccctttgttcacccgctggatgtatgacaatcctgcccacaattctgttcttaattgcaagaatattgaaagacacagcaataaagtctgcagataatcaggttcctccaccagtcagtgcagctcttcaagggattaaaagtattgtgacactttcaatggccaaaactgaggctggcgttcaaaaacagtggacagctctgattcgtagcacgcttgcttgcatcctggaatattctcaaccagaagactctgtacctacacctgatgaagtaagcatgctaacagcaattgcactcttcctgtggtctgctagtaatgaaataataggagtccagtcattacagaatggctgcatgaacagatttaaaaatgcattaaattcatgcgacccatgggttcaagccaaatgttaccagcttctcctctcagtcttccagcattccaatcgtgccctttcaactccttatattcattcattagctccaatagtggttgaaaagctaaaagctgttgaaagaaacagaccagccagtaacatagagcttttagcggttcaagaaggaataaaagttcttgaaacactggttgctcttggtgaagaacaaaacagagtccagctacttgctcttttagttcccactttgatatcttacctgctggatgaaaattcttttgcctcagcaagttcagcttccaaagatcttcatgagtttgcactccagaatttaatgcatattggacctctgtatccacatgctttcaagacagtaatgggggctgctcctgagttgaaagtgcgtctagaaactgccgttcgagcaagccaagcgagcaaagctaaagcggctgccagacaaccagcccccgccatacattctgcaccaacaattaagctaaaaacaagttttttttaatttgtaatttcatttatttgtatttatgttgtcaactagcccctaattagtgatggccactgtatcattccaggctacctatgggttctgttttatttgtatattggtattatagtgcttccaagtaggttaagtgaaataatgctcacaccatttattgatttttaaggagtgattttttttatcatgtggtgaatatgttttcattttcctcctaataatgtttctcttttgttaacttatttatttttcaaacactgagccatagtcttaaatttaaatgctaaaaacaattgtatcatgtagtcgggcagcctattgatactgtcaggggaaaaaaatgggtcagaactcagcatctgtcatgaaaaaaatcaattgaaaaacaagcagattttaaattttgaagtaatcaaaataatggaaagtgtctgttttgtggtgtatatactatgaataaaatcacagcattttctaagc

SEQ ID NO: 119 - DNA, 4240 bp, Homo sapiens
  CDS (781)..(2703)
aaatctgagcagtcagatcctcattatttcacatgggaaggtggcaattaataatattttctcaaacacatgaccctatattttgtcagcaagagtccccagttatgtgtcaaggagatatgacaggccccactatcatcattcttagacatttagactaattctgctcaaagtatcctttgtagactttattgcaggtctgtgaaagaataggtaaataaattgaaagtaagggctgagaaattttggtagcaatttgacattgttataatgtccaatttttctaatattttatttttattgtatcttacgaaatatccatatgcaatggattcgaaataaagaaaaatctggtccttcatcagaactaggaaagcactgatttaaacatttggtcagacattttaaattgaattagtaagctgtgtgggctggactactgctgaagagctgtattcatgtagtgatgatcaccagatagtgaagtggaacttgttaaccagtgaaacaactcaaatagtaaagcttcctgatgatatttaccctattgattttcactggtttccaaaaagtttgggtgtaaagaaacaaacccaggcagaaagctttgtcctcacaagttctgatggtaaatttcatctgatttccaagttaggaagagtggaaaaaagtgtagaagctcactgtggagcagtacttgcaggaagatggaattatgaaggaacagcattagttacagttggagaagatggacaaataaaaatttggtcaaagactgggatgcttagatcaactttagctcagcaaggaacaccagtgtattcagtagcgtggggccctgattcagaaaaggttctttatacagcaggcaagcagctaatcattaaacctcttcaaccaaatgctaaagttttgcagtggaaagctcatgatggcattattttaaaagtagattggaactcggtcaatgatcttattttatctgctggtgaagactgtaaatataaggtatgggatagttacggccgcccactgtacaattcacaacctcatgagcatcccattacttcagttgcctgggctccagatggagaattatttgctgttggatcgtttcatactttacgcttgtgtgataaaactgggtggtcatatgcattagaaaaacccaacactggcagcatatttaatattgcatggtctatcgatggcactcagattgctggagcctgtggaaatggacatgtcgtttttgcacatgtggtggaacaacattgggagtggaaaaattttcaagtaacattaacgaaaagaagagccatgcaggttcgtaatgttcttaatgatgcagtggatttactggaattccgtgatagagtcattaaagcatctttgaactatgcacacttagttgtttcaacgtctcttcaatgttacgtgttctccacgaagaactggaacacaccaattatatttgatctcaaagaaggaactgttagtttgattctgcaggcagaaagacattttcttcttgtagatggtagtagtatctatttatattcatatgaagggcgctttatttcatctccaaaatttcctggaatgagaacagatattctgaatgcacagactgtgtctttgagtaatgataccatagcaataagagacaaagctgatgaaaaaataatcttcctctttgaggcatcaaccggaaagccgttaggtgatggaaagtttctttctcataagaatgaaatcttggaaattgctctggatcaaaaaggacttaccaatgatagaaaaattgctttcattgataaaaatagagatctctgtatcacttctgtgaaacgatttgggaaggaagaacaaattatcaagcttggaacaatggtgcatactttggcatggaacgatacatgcaatatcctttgtggacttcaagatactcgatttatagtgtggtattaccccaatacagtttatgtggacagagacattttgcctaaaacattatatgaaagggatgcaagtgaatttagtaaaaatccccatattgtgagttttgttggaaatcaagtaactattagaagagctgatggctccctggttcacatcagcataacaccatatcctgctattctccatgaatatgtaagcagttcaaaatgggaagatgctgtgagactttgtcgctttgttaaggagcaaaccatgtgggcttgtctagctgctatggcagttgctaatcgagatatgactactgcagaaatagcctatgcagcaattggtgaaattgataaggttcagtacatcaattctataaaaaatcttccatctaaagaatcaaaaatggcccacatactactgtttagtgggaacatacaggaggctgaaatagtacttcttcaggctggccttgtttatcaagcaatccagatcaatattaatctctacaactgggaaagggcactggaattggctgtaaaatacaaaacacatgttgatacagttcttgcttaccgtcaaaagtttttggagacatttggtaaacaggaaactaataaacgatacttgcattatgcagaaggtctccaaatagattgggagaaaatcaaagccaaaattgagatggaaattacaaaagaaagagagcaatcatcaagcagccaatccagcaagagtataggtttaaagccctaaatgccatgcgtatctttaagaaattttatcttttgaaacacgttctgattaaccaagggtaagcatgttttggttgctaaagaaaaaagcataatctttaaccgagtataagtacttgctgtgtatttagtgtaaaagtacatgcagaaagatgaaacacaaagtaattgatgtatttctatcttttatattttttagtccaataattagcaaaatattactatgtacttaagagatacctgtgtagtgtcgattatatgtcagttttttgcccattacttcatccctaaatcttcagcatgaacaaatattaatgtcgataataaaacattggactctttgaaatgtatgttaccattaatttctatttgacctctaaattgtaaaatgcctccaaaagtttatttatagaacaaaaatacatgaggatggatttgtacaaatgtataaaatgccactatttatacaccaagttcatagcagcattactggaatagcaaaagatggaaacagctcaagtgtctatcatgaatggataaacaaatgtgctataatacatacaatggaatattatttagctttaaaaaggaatgaaattctgataaatactacctcaggataaaccttgaaaacactatgctaagtgaaataagccagacacaaaaggccaaatatgatgccacttttatgaggtaccagcataggcaagttcacagaaacagaaaggagaatagtggttgccagggactgcagggaggaggaaatggggggtggggttattgtttaacgagtacatagtttctgtttgggatgaacaaattctggaaatggatagcgatgatggttgctcaacattttgaatgttaatgccactaaattgtacccataaaaatggttaaaatggtaaattttgttatgtatattttatcataatttaaaaaatatatctagaatgggcaagaaggattctcctcattcctctcttgacttgagaatgatcagtcaataggccctgaagtctgaatttgtgaaaatttccttgggtgacaaacttgtttgattactctatttagtgtatcccaaagttattaccacataatcttttaaacaataaaacaaataccccttagaaagtcttctgcaaacccatttctgaaaatggtacattatagggtgggtatagatgcatagatatgggattatgtatgatatatatatatatacacacacacacaaagggatagagagattacctctcttaacccccattttaattactatgtctaggttttttaaataaaaatcttttctttttaacatgtttcttttcttttccggaatattggaatattctgttcttgatccagatgaaatctgattgagcagtgtacttacaagttgtactgtgtatgtgtttcctatattgttatatttcaataagaagcttaaaatgtttaaaaataaatggttaaaaggttttatgttatgtatattttaccacaataaatgcaaaaaataaaaagtcaaaaaaaaaaaa

SEQ ID NO: 120 - DNA, 753 bp, Homo sapiens
  CDS (118)..(498)
ttttgatatagatcgccttcggtaccgctccggaattcccgggtcgacccacgcgtccgcccacgcgtccgcggacgcgtgggccgaaggggacgccgggaacaggaatttcttcacatggctcctggagaagtgaccatcacagttcgcctcatccgttcctttgaacatcgcaatttcaaacctgtagtgtatcacggagtgaatttggaccaaactgtaaaggaatttatcgtatttctaaagcaagatgtccctttaaggaccaacctgccaccaccattcagaaattataaatatgatgcactaaagattattcatcaagcacataaatcaaagacaaatgaacttgtgttgagtttggaagatgacgaaagactcctgctgaaagaagacagcactctgaaagcagctggaatcgccagtgaaactgaaattgcattcttctgtgaagaagattataggaactacaaagctaatcccatttcatcctggtgaaaacatctcgagggcttcctttttgcatacctgtattaagctctttattccactgctgagtttttgaaattgacaaacaaatcttaaaaaattaatcccaggctatactctttgagctaaaatctggttatttctttctcttcaggtctttctttccttctctctttctttttctttgttgttgtaaaataatatattatgagaaaaacatttgatctttttaaagggaaataaattgttattaaaaaaaaaaaa

SEQ ID NO: 121 - DNA, 2474 bp, Homo sapiens
  CDS (197)..(1600)
gaccgacttcccgggtcgacccacgcgtccggggcggcggtgcccgggcgtcccctgcagacacgcagccccgtggaactcccggcgggacggttggggctggaggaacaggacgcccgctctcggcctcccttcccgggcctgggctgagggcagccgttggtgggtttcagggccgcctgggcagaatgtcacgatggacgagggcggcacgcccctgctccccgacagcctggtctaccagatcttcctgagcctgggcccggccgacgtgctggccgccgggctggtgtgccgccaatggcaggccgtgtcgcgggacgagttcctgtggagggagcagttctaccgctactaccaggtggcccgcgacgtgccccgacacccagcggccatgtcctggtacgaggagttccagcggctgtatgacacggtgccctgcgtggaggtgcagacgctgcgggaacacacagaccaggtcctgcacctcagcttctcccattccgggtaccagttcgcgtcctgctccaaggactgcactgtgaagatctggagcaacgacctgaccatctcgctgctgcacagcgcggacatgcggccctacaactggagctacacccagttctcccagttcaacaaggacgactcgctactgctggcctcgggggtgttcctggggccgcacaactcctcatccggcgagattgctgtcatcagcctagactccttcgcgctgctgtcccgcgtgcggaacaagccctatgacgtgtttggctgttggctcaccgagaccagcctcatctcggggaacctgcaccgcatcggagatatcacctcctgctcggtgctgtggctcaacaatgccttccaggatgtggagtcagagaacgtcaacgtggtgaagcggctgttcaagatccagaacctcaatgccagcaccgtccgcacggtgatggtggccgactgcagccgcttcgacagccctgacctgctgctggaagccggtgacccggccacgtccccctgccgcatctttgacctgggcagcgacaacgaggaggtggtggctggcccggcccccgcccacgccaaggagggcttgcggcactttctggaccgcgtgctggaggggcgggcgcagccacagctgtcggagcgcatgctagagaccaaggtggccgagctgctggcccagggccacaccaagccacccgagcgcagtgccacaggcgccaagagcaagtacctcatcttcaccactggctgcctcacctactccccacaccagatcggcatcaagcagatcctgccacaccagatgaccacggcagggcccgtgctgggtgagggccggggctccgatgccttcttcgacgcgctggaccacgtcatagacatacacggacacatcatcggcatgggcctgtcgcccgacaacaggtgggcctcttgccagtgtcccaggcggggtgcccgcaggcggcccacacctagcacagtgcccctcgcccaggtacctgtacgtgaacagccgcgcctggcccaacggtgcggtggtggccgaccccatgcagccgccaccaatcgcggaggagattgacctgctggtgttcgacctcaagaccatgcgggaggtgaggcgggctctgcgtgcgcaccgcgcctacacgcccaacgacgagtgcttcttcatcttcctggacgtcagcagggacttcgtggccagcggggcggaggaccggcacggctacatctgggaccgccactacaacatctgtctggccaggctgcggcacgaggatgtggtcaactcagtggtcttcagtccccaggagcaggagctgctgctcacggccagcgacgacgccaccatcaaagcctggcgctccccacgcaccatgcgcgtcctccaggcacctcgcccacggcctcgcaccttcttctcctggcttgccagccagaggcgctgaggtgtgctgggtgcactggagccaccgggaccccttgaggacatcgccaggctctgtggctttttcccgagcgggagaggtggagatgcttatagcagttacgccttaggaaggggacaaccaggccccgccacacgctcacacacaaacctgctcacgcagctgtgatgcttggcacggggtggccagtgcagatggagcccaaggccccctcggcctcctgggcaacttggggtacacaggatactgggggtgccgctcctcactcaaccccaggctaggggtacacctgacccagctggcctcggcccggggcaccttcggctggtcctgtggggccctggacggtggcccagtggtggcaggggctgctcctggctgtggttgtgcgcccggggcttgggagcggccggtcacgctgctgtgggcccgagtgtgttgcatgtccacgcaccacccgttcagggccctgaataaacagttggcaacagcaaaaaaaaaaaa

SEQ ID NO: 122 - DNA, 878 bp, Homo sapiens
  CDS (40)..(534)
atttggccctcgaggccaagaattcggcacgagggcgccatgtcgtttgctgagagcgggtggcggtcggctctgcggcgccgcggtcccggcaccccgggccctgtggctcggccatcgtattcctcctttactcagggggacagctggggtgaaggcgaagtcgacgaggaggagggatgcgaccaagtggcccgcgacctgcgggcggagttctcggctggggcgtggtcagagcccagaaagcgctcggtgctcccgccggacgggaacgggtcgcccgttctgcccgataagcgcaatggtatctttcccgcggccgcgggcagcagagcccagcctcggcggtggccggtccaggtcctctctattctctgctcgctgctcttcgccattcttctcgccttcctcctcgccatcgcctacttgatcgttaaagagttgcatgctgagaatttgaaaaatgaagatgatgtagacactggactattaggaattatctgtattagcaggaaattttcccttatgctgtaagttgcaaaggattctggactctacttataatatccctaactgctggattctcctgttgcagcttttcttggacagtgacttactttgattcttttgaaccaggaatgtttcctcctactcctctttcacctgccaggttcaagaaactgactggacattctttccacatgggctatagcatggcgattttgaatggcatcgtagctgctcttactgtagcatggtgcctcatgtaaacccacactggagcgatattgttggcaaaacttaatcatgattgtgttgtaataacaagaaggagcatcactgtctactcagaagactgagaaactgctggtcattag

SEQ ID NO: 123 - DNA, 4470 bp, Homo sapiens
  CDS (223)..(2391)
attctttggaatactactgctagaagtctgacttaagacccagcttatgggccacatggcacccagctgcttctgcagagaaggcaggccactgatgggtacagcaaagtgtggtgctgctggccaagccaaagacccgtgtaggatgactgggcctctgccccttgtgggtgttgccactgtgcttgagtgcctggtgaagaatgtgatgggatcactagcatgtctgcggagagcggccctgggacgagattgagaaatctgccagtaatgggggatggactagaaacttcccaaatgtctacaacacaggcccaggcccaaccccagccagccaacgcagccagcaccaaccccccgcccccagagacctccaaccctaacaagcccaagaggcagaccaaccaactgcaatacctgctcagagtggtgctcaagacactatggaaacaccagtttgcatggcctttccagcagcctgtggatgccgtcaagctgaacctccctgattactataagatcattaaaacgcctatggatatgggaacaataaagaagcgcttggaaaacaactattactggaatgctcaggaatgtatccaggacttcaacactatgtttacaaattgttacatctacaacaagcctggagatgacatagtcttaatggcagaagctctggaaaagctcttcttgcaaaaaataaatgagctacccacagaagaaaccgagatcatgatagtccaggcaaaaggaagaggacgtgggaggaaagaaacagggacagcaaaacctggcgtttccacggtaccaaacacaactcaagcatcgactcctccgcagacccagacccctcagccgaatcctcctcctgtgcaggccacgcctcaccccttccctgccgtcaccccggacctcatcgtccagacccctgtcatgacagtggtgcctccccagccactgcagacgcccccgccagtgcccccccagccacaacccccacccgctccagctccccagcccgtacagagccacccacccatcatcgcggccaccccacagcctgtgaagacaaagaagggagtgaagaggaaagcagacaccaccacccccaccaccattgaccccattcacgagccaccctcgctgcccccggagcccaagaccaccaagctgggccagcggcgggagagcagccggcctgtgaaacctccaaagaaggacgtgcccgactctcagcagcacccagcaccagagaagagcagcaaggtctcggagcagctcaagtgctgcagcggcatcctcaaggagatgtttgccaagaagcacgccgcctacgcctggcccttctacaagcctgtggacgtggaggcactgggcctacacgactactgtgacatcatcaagcaccccatggacatgagcacaatcaagtctaaactggaggcccgtgagtaccgtgatgctcaggagtttggtgctgacgtccgattgatgttctccaactgctataagtacaaccctcctgaccatgaggtggtggccatggcccgcaagctccaggatgtgttcgaaatgcgctttgccaagatgccggacgagcctgaggagccagtggtggccgtgtcctccccggcagtgccccctcccaccaaggttgtggccccgccctcatccagcgacagcagcagcgatagctcctcggacagtgacagttcgactgatgactctgaggaggagcgagcccagcggctggctgagctccaggagcagctcaaagccgtgcacgagcagcttgcagccctctctcagccccagcagaacaaaccaaagaaaaaggagaaagacaagaaggaaaagaaaaaagaaaagcacaaaaggaaagaggaagtggaagagaataaaaaaagcaaagccaaggaacctcctcctaaaaagacgaagaaaaataatagcagcaacagcaatgtgagcaagaaggagccagcgcccatgaagagcaagccccctcccacgtatgagtcggaggaagaggacaagtgcaagcctatgtcctatgaggagaagcggcagctcagcttggacatcaacaagctccccggcgagaagctgggccgcgtggtgcacatcatccagtcacgggagccctccctgaagaattccaaccccgacgagattgaaatcgactttgagaccctgaagccgtccacactgcgtgagctggagcgctatgtcacctcctgtttgcggaagaaaaggaaacctcaagctgagaaagttgatgtgattgccggctcctccaagatgaagggcttctcgtcctcagagtcggagagctccagtgagtccagctcctctgacagcgaagactccgaaacaggtcctgcctaatcattggacacggactcttaataaaacggtcttcagttccagattccttcccagcaagctatagcttaagtccattttcttccgtgaaagggacaggactccatcaagttatggaattcctcagagccctgggcctgtcccccggggtggattagtcatgtccagcagcacacgcctagtcccgccttcgggaaggctgcctgcctggccagccgcccaggcctctctgtgtaaagactgcctggctgtcctgcccagccttcctggttctctggggtcctctgggtgggtggcatctcctggagggtgatgacaatccccaacacatgcattcatgtggtgctactctgtgtgcaaagccagaccccaagtatgttttctctctttgtcccatccctctttttctgggactttggaccctaactacttccctcctgaaccttgcagtgacatcagtccaggagagctctcgttcagtgtgcggaagaacactctgacctctagagctgtcctagataaggagtgggagctttagaggcaaggcctctagaccctggaaggctcagtgaggctcttcccacagcatgcttctcactggtgccctgtaaggctcgagccaccgctgactctgagccttttggagtctttcctccttcgtctccattgttcccgtgcatttccaaaagcttaagttgcctggtgggcatttccccagtttctttggcctccgtcttctcaagtcacatagggaaagtacctcctggaaccaggctgcagtatgcaggacctgccaggcaggcactggtgaagggccttgggcctatcatcccctcaaccccacctcaccccacccgcctcctctagtggggtgagtctgggctggtggaccagagagggtgtcacagaccctcagggactgccccatggacacctctgactggtgttaacagtgtgaacattttccccgtcttcagtcccttagaatgacgacagcccctggggttggggcaggcgagtgtggccacatcatccaagccctcccagagacacaaataggcttttttgctctaaaaataaataccagcccttttttggtcacaaatccagcatctcagcagaaaactgcctgacatgaaaagtcccctgaggaactgcatctgcgtttcaggggcttttcattttttctccttttttaaagtgtagattgtgggtgcttcctagaggcctgccttcttctggaactggaagtgggctatcaccatgggcaagcccttgggtgcaggctccccacctgcctgggaactctggcagctctcctcagctccttgggcttgagcagctgcaactgccccagatttgctgtggaagcaggggctagccctggcctcaccagggcctcccggggccctgcattgatgctcaggagttcctgggctgctcttgatcctttctgggcatccagcttccagttaagctctgtttgccaaacaaactattctcagctgccctttggcctgcgcctgatgtgttcctgttgcagtcccgcctgcctgagacaggagcaggcaggagagccttcatgcccagattcccacaggacaattggggagctgctggcattgtctttctgggaagattctgctttcttggaccaaatggcagcctgattaccagtgtcgggcctgcatgctgcccccgacacacgcacgcacgcgcacacacgtgtgcacatgggccatagccacaagccagctctcctccagggtcctttcaacctcgctgtccagggaccctgtccttcttgcccgtggggcttccatctggcagagaacgttcagggcttgttgaacttgaaagctcattagacttaagctgtcacctgtgcttggtgccccaggaacagccagagaggacagtgcccactcacttcttgttggcagcctcctgtgcaggaagtgccagccgggcctcgacgcaccagctggctgtgggtcctgaggaggggcgggaggcggccgctctagagtatccctcgaggggcccaagcttacgcgtacccagctttcttgtacaaagtgg

SEQ ID NO: 124 - DNA, 2253 bp, Homo sapiens
  CDS (110)..(1801)
acctgcggtaccgctccggaattcccgggtcgacgatttcgtgcggagcccggcccgagagccgcgtccacgttcctgcctcctgctcccgccgccctggggcgccgccatgacgcccgatctgctcaacttcaagaagggatggatgtcgatcttggacgagcctggagagcctccctccccctcgctcaccaccacctctacttcgcagtggaagaaacattggtttgtgctgacagattcaagtctcaaatattacagagactccactgctgaggaggcagatgagctggatggtgagatcgacctgcgttcctgcacggatgtcactgagtacgcggtgcagcgcaactatggcttccagatccacaccaaggatgctgtctataccttgtcggccatgacctcaggcatccggcggaactggatcgaggctctgagaaagaccgtacgtccaacttcagccccagatgtcaccaagctctcggactctaacaaggagaacgcgctgcacagctacagcacccagaagggccccctgaaggcaggggagcagcgggcgggctctgaggtcatcagccggggtggccctcggaaggcggacgggcagcgtcaggccttggactacgtggagctctcgccgctgacccaggcttccccgcagcgggcccgcaccccagcccgcactcctgaccgcctggccaagcaggaggagctggagcgggacctggcccagcgctccgaggagcggcgcaagtggtttgaggccacagacagcaggaccccagaggtgcctgctggtgaggggccgcgccggggcctgggtgcccccctgactgaggaccagcaaaaccggcttagtgaggagatcgagaagaagtggcaggagctggagaagctgcccctgcgggagaataagcgggtgcccctcactgccctgctcaaccaaagccgcggagagcgccgagggcccccaagtgacggccacgaggcactggagaaggaggttcaggctcttcgggcccagctggaggcgtggcgtctccaaggggaggctcctcagagtgcactgagatcccaggaggatggccacatccccccgggctacatctcacaggaggcatgtgagcgcagcctggcagagatggagtcctcgcaccagcaggtgatggaggagctgcagcggcaccacgagcgggagctgcagcgcctgcagcaggagaaggagtggctcctggctgaggagacggcagccacggcctcagccattgaagccatgaagaaggcctaccaggaagagctgagccgagagctgagcaaaacacggagtctccagcagggcccggatggcctccggaagcagcaccagtcagatgtggaggcactgaagcgagagctgcaggtgctatcggagcagtactcgcagaagtgcctggagattggggcactcatgcggcaggctgaggagcgcgagcacacgctgcgccgctgccagcaggagggccaggagctgctgcgccacaaccaggagctgcatgggccgcctgtcagaggagatagaccagctgcgcggcttcattgcctcgcagggcatgggcaatggctgcgggcgcagcaacgagcggagttcctgcgagctagaggtgctgcttcgcgtaaaagaaaacgaactccagtacctaaagaaggaggtgcagtgcctccgggacgagctccagatgatgcagaaggacaagcgcttcacctcgggaaagtaccaggacgtctatgtggagctgagccacatcaagacacggtctgagcgggagatcgagcagctgaaggagcacctgcgtcttgccatggccgccctccaggagaaggagtcgatgcgcaacagcctggctgagtagaggtcccgcccagctgcagaccctccaggctggaggaccagccgccctccttccctcctggatggaagtaaaaagccaagctttctccccaccctctgtgggccacacgtgcacttgcacccaccacacacacacacacacacacacacacacacagacacacagacacatacgcacacacgtgcacacatgtacacacggatacacacacacacacacacacacacacactgcatatctgagcacgcccctcgcactgggtctcaccttgcaccttcttcaggattttatatgtgaagagatttttatatagatttttttcctttttttccaaaacactttatactttaaaaaaaaaaaa

SEQ ID NO: 125 - DNA, 1743 bp, Homo sapiens
  CDS (1027)..(1431)
atttggccctcgaggccaagaattcggcacgagcagaggtcacacagaggtgaagtgggagttctggaaatagagtggtttgttttattttgagacagtggcacctaggctggagtgcactgaagcgtcaacctcctaggcccaagtgatccttccacctcagcctcctgagtagctgggactacaggcacctgctaccacgcctgactaatttttgtatttttagtacagatggggtttcgccacgttggccaggctggtctcgaactcctgacctcaggtgatctgcccgtctcgtcctcccaaagtgctgggattacaggtgtgagccaccacgcccagccaccactacgcactttaaaaccaaaaaaagctcaaagggatggatcattgtccatggctcaggagccccactgtgggctaagtgtgatgtcgatggattaatttagacagtggtgtattcatcagggcaaaggaaattcttccagaggtgatgatgcggcagactacttcccagtcgtctctcccaaacgcatagcatggcccgtcgttgtcgactcctcgtcgagttgggctggcaaccagctttgccactcgctttcctacgaatgctactcaacgcctcgttctgtaaactactcgaagcgaattcgactgggcgttcgagcgaaacggatggctgcatgtgaccagggtcccaaggccacagcttttcagatcctaggaagcaagtggcatttgcttgagttgtggcctcggaaggagaatgtttatctgttttctaactttgctgacaccaggattctccctgtcattgagaagaaagcattatctaattaccttcaggtggtttacttattctgtaaagaatatgtgtaaatattttgtacagagccctgtatcaaataaacagccatatgtggttactaatcacctcttctgtcattccgtccttggccaccgctcagtgggaatggtctctgatctggatgctcccaccttccatgtcaggcccagaactgtgccatggtctgtggactcctggtcagccttgactggctaggagaccttgggcagtacctacagtcttgctgtttctgtttcatctgcaagaattatgacccacacactccagctgcagcccagggcactgtgatattttatacgtgtgtagatgtttttgtccacagttcctggttcatcactcccataaccctttgttataatgttgggacactgcaggcctcagaaaacggaatctctgtctgtgaccttctcctgccccatttcacttgctcaacaccagactttaatctgactgtagctcataagaccctcattccagagagggtgctgccccatacccggaaggaggaacgctgcacagagaggccaagaagcatctggacagacaggccttgctgggtttagaccttatgctttttgtccagtttcatctcaacacagctgccatgcttcagccatgcctatccaatgacgtctccataaaaggcccaggaacacgggagcttctgaagagctgaacatgtggagggaggggaacgagaacttgtccatgtgccaagagggtggcgcacccccactccatggggacagaagctccagcatttgcccaggacccgtccagacctcaccctgtgtgtatcttcatctggctgtttacttatttgtatccttttctaataacgtttgtaataaactggtaaacataaaaaaaaaaaa

SEQ ID NO: 126 - DNA, 9212 bp, Homo sapiens
  CDS (2915)..(9040)
atggcacaactagaagagtctacaatgttacccagcacgctgctggcattgttgtataccaacaagggcctgattcttgccaagagaattaatgtgcgtatcgagcacattaagctcactaagagccgagatagcttcctgaaacacatgaaggaaaatgaccagaaaaagaaaacaaagagaaaggcggcgggaccagtgcagccgccgcctcccaggatcgtccgccggtcagggcccttgccctccccggcacaggccaccatggccaccaacccacagccgcagccgcctcctccggcgccgccgcctcccccgccgcagccgcagccgcagccaccgccgccgccgccgggccccggggctggccccggcgcgggcggggcgggcggcgcgggtgcgggcgccggggacccgcagctcgtggccatgatcgtgaaccacctcaagagccaggggctcttcgaccagttccgcagagactgcctggccgacgtggacaccaagcctgcgtatcagaatctgagacagcgtgttgacaactttgttgcaaatcacttggcaactcacacatggagtccgcatctcaataagaaccagctaagaaacaacattagacaacaagtcctcaaatcaggaatgttggagtctggtattgaccgaattatttctcaggttgtggacccaaagatcaaccacacattcagacctcaggtagagaaagctgtgcatgagtttttggccacgctaaatcacaaagaggaaggaagtggcaacacagctcccgatgatgagaaaccagacacttcccttattacacaaggtgttcctactcctgggcccagtgctaatgtagccaatgatgccatgtcgatattggaaaccataacttctcttaaccaagaagccagtgctgctagggcttcaacagaaacatcaaatgccaagaccagtgagagagcgtcaaaaaaacttccatctcagccaaccactgatactagtactgacaaagaaagaacttcagaggacatggctgataaagaaaaatctacagctgactctggaggtgaaggactggaaacagccccaaagtctgaagagttcagcgacctcccctgtccagtcgaagaaattaaaaattacacaaaagagcataataatttaattctgctaaataaggatgttcaacaggaaagcagtgagcaaaaaaataaatcaacagacaaaggtgaaaagaagccagacagcaatgagaaaggagaaagaaagaaagaaaagaaggaaaagactgaaaagaaatttgatcactcaaaaaagagtgaagatacacagaaagttaaagatgaaaaacaagcaaaggaaaaagaagtagagagtttaaaacttccttcagaaaagaacagtaataaagctaaaactgttgaagggacaaaagaagatttctctttgatagattctgatgtggatggacttacagacatcacagttagctctgttcataccagtgacctttcatcttttgaagaagatactgaggaggaagttgtaacgtctgatagcatggaagaaggagagattacgtcagatgatgaagagaagaacaaacagaataaaacaaaaactcaaactagtgattctagtgaaggaaaaacaaaaagtgtacggcatgcgtatgtccacaaaccatatctttactcaaaatactatagtgattctgatgatgagcttactgtagaacaacgacgacagtccattggtattttgtggttttaggccaaagaaaaagaagagaggcttttaagaaggcaaatcaatagagaaaaacttgaagaaaaacgaaaacagaaagcagaaaagacaaagtcttcaaaaaccaagggtcaaggcaggagtagtgtggacttagaagaatcatcaacaaagagtttggaacctaaagccgccagaattaaagaagtccttaaagaacggaaagttttagaaaaaaaagtagccttaagcaaaaagagaaaaaaagattcaaggaatgttgaagagaactccaaaaagaaacagcaatatgaagaagattccaaagaaacccttaaaacaagtgagcattgtgaaaaggaaaaaatttcttcttcaaaggagctgaagcatgttcatgcaaaaagtgaaccaagtaaacctgcccggagactttcagagtctttgcatgtagttgacgaaaacaaaaatgaatccaaaatagaaagagaacataaaagacggacatctacccctgttatcatggagggggtacaggaagagactgacacaagagatgtaaaaaggcaagtagaacgctcagaaatttgcaccgaagagccccagaaacagaaaagcacacttaaaaacgaaaagcatctaaagaaagatgattctgaaacaccacatttgaaaagcctacttaagaaagaggtgaaatcctccaaggagaagcctgaaagagagaaaactccatcggaagacaaattgtctgtgaaacataaatataaaggtgattgtatgcataaaacaggtgatgagactgagcttcactcttctgagaaaggtttaaaagtagaggaaaatattcaaaagcaaagtcaacaaacaaagctttcttcagatgataaaaccgaacgaaaaagtaaacataggaatgaaaggaaattatcagtattaggcaaagatggaaagccagtttctgaatatattataaaaacagatgagaatgttcgtaaaaaaaaaaaaaaaaaatgagagacgcttgtcagctgaaaaaactaaggcagagcacaaatcaagaaggtcaagtgattctaaaattcagaaagattctctgggttccaagcaacatggtatcacattacagagaagaagtgaaagttattcggaagataagtgtgatatggactccactaacatggatagtaatttgaaaccagaagaggttgttcacaaggagaaacgacgaacaaagagcttgttagaagagaaacttgtgttgaagtctaaatcaaaaactcaaggcaaacaggtaaaagttgtagaaacagaattacaagaaggtgccacaaaacaggcaaccactccaaaaccagacaaggagaagaacacagaagaaaatgactcagaaaaacagcgtaagtctaaagttgaagacaaaccttttgaagaaactggtgttgaacctgtattagagactgcttcttcttcagcacatagtacacagaaggattctagtcatagagccaagttaccattagcaaaggagaaatataagagtgataaagactccacttccaccaggcttgagagaaagttgtcagatggccacaaaagcagaagcttaaagcatagtagtaaaaacataaaaaaaaaggacgaaaataaatcagatgacaaggatggtaaagaagttgacagtagtcatgaaaaggccagaggtaatagttcactcatggaaaagaaattaagtagaaggttgtgcgaaaatcggagaggaagcttgtcacaagaaatggccaaaggagaagaaaaattagcagcaaacactttgagcactcccagcggttcctcccttcagagaccaaaaaagagtggtgatatgacattgatccctgaacaagagccaatggaaattgattctgagccaggtgttgaaaatgtgtttgaagtatctaaaacccaagacaaccgcaataataattctcagcaagacattgactctgaaaatatgaaacaaaaaacttctgccactgttcaaaaggatgaattgagaacttgcacagcagattcaaaagcaacagctccagcttataagccaggccgtggaacaggagttaatagtaattctgaaaagcatgccgatcatagaagcaccttgaccaagaaaatgcatatacaaagtgctgtgtccaaaatgaaccctggggagaaagaacccattcatagaggaactactgaagtgaatatagattctgaaactgttcatagaatgttactgagtgccccatcagaaaatgatagggtacagaagaatttgaaaaacacagctgctgaagaacatgttgctcaaggagatgccactcttgaacattccacaaatttagactcctcaccatccttaagttcagtgactgttgtgcctctgagggaatcgtatgatccagatgtaattcctctgtttgacaaaagaactgttttggaaggtagcacagccagcacctcccctgcggatcactctgctctccctaaccaaagtctgactgttagggaatcagaagtccttaagacaagtgacagcaaagaaggtggtgaaggtttcacagtagatacaccagcaaaagcaagcatcactagcaaaagacacattccagaagctcaccaggctactttattggatggtaaacaaggaaaggtaatcatgcctcttggaagtaagttaacgggcgtgattgtggaaaatgagaatattaccaaagaaggtggcttagtggacatggccaagaaagaaaatgacttaaatgcagagcccaatttaaagcagacaattaaagcaacagtagagaatggcaagaaggatggcattgctgttgatcatgttgtaggcctgaatacagaaaaatatgctgaaactgtcaaacttaagcataaaagaagcccaggtaaagtaaaagacatatcaattgatgttgaaagaaggaatgaaaacagtgaggtagacaccagtgctggaagtggctctgcaccctctgttttacaccaaaggaacggacaaactgaggatgtggcaactgggcctaggagagcagaaaagacttctgttgccactagtactgaagggaaggacaaagatgtcaccttaagtccagtgaaggctgggcctgccacaaccacttcttcagaaacaagacaaagtgaggtggctttgccttgcaccagcattgaggcagatgaaggcctcataataggaacacattccagaaataatcctcttcatgttggtgcagaagccagtgaatgcactgtttttgctgcagctgaagaaggtggggctgttgtcacagagggatttgctgaaagtgaaaccttcctcacaagcactaaggaaggggaaagtggggagtgtgctgtggctgaatctgaggacagagcagcagacctactggctgtgcatgcagttaaaatcgaagccaatgtaaatagcgttgtgacagaggaaaaggatgatgctgtaaccagtgcaggctctgaagaaaaatgtgatggttctttaagtagagactcagaaatagttgaaggaactattacttttattagtgaagttgaaagtgatggagcagttacaagtgctggaacagagataagagcaggatctataagcagtgaagaggtggatggctcccagggaaatatgatgagaatgggtcccaaaaaagaaacagagggcactgtgacatgtacaggagcagaaggcagaagtgataactttgtgatctgctcagtaactggagcagggccccgggaggaacgcatggttacaggtgcaggtgttgtcctgggagataatgatgcaccaccaggaacaagtgccagccaagaaggagatggttctgtgaatgatggtacagaaggtgagagtgcagtcaccagcacggggataacagaagatggagaggggccagcaagttgcacaggttcagaagatagcagcgaaggctttgctataagttctgaatcggaagaaaatggagagagtgcaatggacagcacagtggccaaagaaggcactaatgtaccattagttgctgctggtccttgtgatgatgaaggcattgtgactagcacaggcgcaaaagaggaagacgaggaaggggaggatgttgtgactagtactggaagaggaaatgaaattgggcatgcttcaacttgtacagggttaggagaagaaagtgaaggggtcttgatttgtgaaagtgcagaaggggacagtcagattggtactgtggtagagcatgtggaagctgaggctggagctgccatcatgaatgcaaatgaaaataatgttgacagcatgagtggcacagagaaaggaagtaaagacacagatatctgctccagtgcaaaagggattgtagaaagcagtgtgaccagtgcagtctcaggaaaggatgaagtgacaccagttccaggaggttgtgagggtcctatgactagtgctgcatctgatcaaagtgacagtcagctcgaaaaagttgaagataccactatttccactggcctggtcgggggtagttacgatgttcttgtatctggtgaagtcccagaatgtgaagttgctcacacatcaccaagtgaaaaagaagatgaggacatcatcacctctgtagaaaatgaagagtgtgatggtctcatggcaactacagccagtggtgatattaccaaccagaatagcttagcagggggtaaaaatcaaggcaaagttttgattatttccaccagtaccacaaatgattacacccctcaggtaagcgcaattacagatgtggaaggaggtctctcagatgctctgagaactgaagaaaatatggaaggtaccagagtaaccacagaagaatttgaggcccccatgcccagtgcagtctcaggagatgacagccaactcactgccagcagaagtgaagagaaagatgagtgtgccatgatttccacaagcataggggaagaattcgaattgcctatctccagtgcaacaaccatcaagtgtgctgaaagtcttcagccggttgctgcagcagtggaagaaagggctacaggtccagtcttgataagcaccgccgactttgaggggcctatgcccagtgcgcccccagaagctgaaagtcctcttgcctcaaccagcaaggaggagaaggatgaatgtgctctcatttccactagcatagcagaagaatgtgaggcttctgtttccggtgtagttgttgaaagtgaaaatgagcgagctggcacagtcatggaagaaaaagacgggagtggcatcatctctacgagctcggtggaagactgtgagggcccagtgtccagtgctgtccctcaagaggaaggcgacccctcagtcacaccagcggaagagatgggtgacaccgccatgatttccacaagcacctctgaagggtgtgaagcagtcatgattggtgctgtcctccaggatgaagatcggctcaccatcacaagagtagaagacttgagcgatgctgccatcatctccaccagcacagcagaatgtatgccaatttccgccagcattgacagacatgaagagaatcagctgactgcagacaacccagaagggaacggtgacctgtcagccacagaagtgagcaagcacaaggtccccatgcccagcctaattgctgagaataactgtcggtgtcctgggccagtcaggggaggcaaagaaccgggtcccgtgttggcagtgagcaccgaggaggggcacaacgggccatcagtccacaagccctctgcagggcaaggccatccaagtgctgtttgtgcggaaaaagaagagaagcatggcaaggagtgccccgaaataggaccatttgcaggaagaggacagaaagagagcactttacacctcataaatgcagaagagaagaatgtattgttgaactcccttcagaaagaagataagagcccagagacagggacagcagggggcagtagcacagcaagttattcagcaggaaggggcttagaggggaatgctaactcacctgcccacctgagaggaccagaacagacgtctgggcagacggctaaggattcctctgtcagcagcattcgctatttggcagcagtaaacaccggtgctataaaagctgatgacatgccacctgttcaagggaccgtggctgagcattcctttcttcctgctgagcagcaggggtctgaagacaacttgaaaaccagtaccaccaaatgtattactggccaagaatcaaaaattgctccttcccacacaatgatccctccagctacttacagtgtagctctgttggctcctaaatgtgagcaggacttgactataaagaatgattatagtggcaaatggactgatcaagcatctgctgagaaaacaggagatgataacagcacaaggaaatcattccctgaggaaggagacataatggttactgtgtcttctgaagaaaatgcttatgtgccttcagaggaagagaaaaatggtgaaattctggcaccaccagaaagtctgtgtgggggaaagccaagtggaatagagatatccagtggtagaaaagacaacgcagaagccataagcggtcacagtgttgaagcagatcctaaagaggaagagaactccagagatttggaagaattacctaaaaccagttctgagacaaatagcactacctcaagggtcatggaagaaaaagatgaatatagcagcagtgaaactactggtgaaaagccagagcagaacgatgatgacaccataaaatctcaggaggatgatggtgaagaaaaaatagtaacaagtgtgcgtcggagaggaagaaaacccaaacgttctctcactgtatcagatgatgctgaatcctcagagccagaaagaaaacgccagaaatcagtttctgatccagtggaggacaagaaagagcaggagtctgatgaggaagaggaagaagaggaagaggacgagccttcaggagccaccacaagatccaccaccagatcagaggctcagagaaagcaacatagcaagccatctgcacgtgcaacatccaaacttggcagcccagacacagtttctcctagaaatcgccaaaaattagcaaaagagaagttacctaccagcgaaaaagttagtaactctcccccattaggaagatcaaagacacagctctccccttctatcaagcgcaagagagaagtcagccctcctggggcccgaacaagaggccagcaaagggtggaggaagcccctgtgaaaaaagcgaagcgataatcctgaccactgctgccctaggcttatggaggaacacggtggagaggaaagagacatgccttggtggccataggcttctctttaaccaggaaaaagatatgcatgtgctgtaagtccctagggtgcaagctttttcttgttatgttttaaacagctttataaactattgttg

SEQ ID NO: 127 - DNA, 9071 bp, Homo sapiens
  CDS (2915)..(8899)
atggcacaactagaagagtctacaatgttacccagcacgctgctggcattgttgtataccaacaagggcctgattcttgccaagagaattaatgtgcgtatcgagcacattaagctcactaagagccgagatagcttcctgaaacacatgaaggaaaatgaccagaaaaagaaaacaaagagaaaggcggcgggaccagtgcagccgccgcctcccaggatcgtccgccggtcagggcccttgccctccccggcacaggccaccatggccaccaacccacagccgcagccgcctcctccggcgccgccgcctcccccgccgcagccgcagccgcagccaccgccgccgccgccgggccccggggctggccccggcgcgggcggggcgggcggcgcgggtgcgggcgccggggacccgcagctcgtggccatgatcgtgaaccacctcaagagccaggggctcttcgaccagttccgcagagactgcctggccgacgtggacaccaagcctgcgtatcagaatctgagacagcgtgttgacaactttgttgcaaatcacttggcaactcacacatggagtccgcatctcaataagaaccagctaagaaacaacattagacaacaagtcctcaaatcaggaatgttggagtctggtattgaccgaattatttctcaggttgtggacccaaagatcaaccacacattcagacctcaggtagagaaagctgtgcatgagtttttggccacgctaaatcacaaagaggaaggaagtggcaacacagctcccgatgatgagaaaccagacacttcccttattacacaaggtgttcctactcctgggcccagtgctaatgtagccaatgatgccatgtcgatattggaaaccataacttctcttaaccaagaagccagtgctgctagggcttcaacagaaacatcaaatgccaagaccagtgagagagcgtcaaaaaaacttccatctcagccaaccactgatactagtactgacaaagaaagaacttcagaggacatggctgataaagaaaaatctacagctgactctggaggtgaaggactggaaacagccccaaagtctgaagagttcagcgacctcccctgtccagtcgaagaaattaaaaattacacaaaagagcataataatttaattctgctaaataaggatgttcaacaggaaagcagtgagcaaaaaaataaatcaacagacaaaggtgaaaagaagccagacagcaatgagaaaggagaaagaaagaaagaaaagaaggaaaagactgaaaagaaatttgatcactcaaaaaagagtgaagatacacagaaagttaaagatgaaaaacaagcaaaggaaaaagaagtagagagtttaaaacttccttcagaaaagaacagtaataaagctaaaactgttgaagggacaaaagaagatttctctttgatagattctgatgtggatggacttacagacatcacagttagctctgttcataccagtgacctttcatcttttgaagaagatactgaggaggaagttgtaacgtctgatagcatggaagaaggagagattacgtcagatgatgaagagaagaacaaacagaataaaacaaaaactcaaactagtgattctagtgaaggaaaaacaaaaagtgtacggcatgcgtatgtccacaaaccatatctttactcaaaatactatagtgattctgatgatgagcttactgtagaacaacgacgacagtccattggtattttgtggttttaggccaaagaaaaagaagagaggcttttaagaaggcaaatcaatagagaaaaacttgaagaaaaacgaaaacagaaagcagaaaagacaaagtcttcaaaaaccaagggtcaaggcaggagtagtgtggacttagaagaatcatcaacaaagagtttggaacctaaagccgccagaattaaagaagtccttaaagaacggaaagttttagaaaaaaaagtagccttaagcaaaaagagaaaaaaagattcaaggaatgttgaagagaactccaaaaagaaacagcaatatgaagaagattccaaagaaacccttaaaacaagtgagcattgtgaaaaggaaaaaatttcttcttcaaaggagctgaagcatgttcatgcaaaaagtgaaccaagtaaacctgcccggagactttcagagtctttgcatgtagttgacgaaaacaaaaatgaatccaaaatagaaagagaacataaaagacggacatctacccctgttatcatggagggggtacaggaagagactgacacaagagatgtaaaaaggcaagtagaacgctcagaaatttgcaccgaagagccccagaaacagaaaagcacacttaaaaacgaaaagcatctaaagaaagatgattctgaaacaccacatttgaaaagcctacttaagaaagaggtgaaatcctccaaggagaagcctgaaagagagaaaactccatcggaagacaaattgtctgtgaaacataaatataaaggtgattgtatgcataaaacaggtgatgagactgagcttcactcttctgagaaaggtttaaaagtagaggaaaatattcaaaagcaaagtcaacaaacaaagctttcttcagatgataaaaccgaacgaaaaagtaaacataggaatgaaaggaaattatcagtattaggcaaagatggaaagccagtttctgaatatattataaaaacagatgagaatgttcgtaaaaaaaaaaaaaaaaaatgagagacgcttgtcagctgaaaaaactaaggcagagcacaaatcaagaaggtcaagtgattctaaaattcagaaagattctctgggttccaagcaacatggtatcacattacagagaagaagtgaaagttattcggaagataagtgtgatatggactccactaacatggatagtaatttgaaaccagaagaggttgttcacaaggagaaacgacgaacaaagagcttgttagaagagaaacttgtgttgaagtctaaatcaaaaactcaaggcaaacaggtaaaagttgtagaaacagaattacaagaaggtgccacaaaacaggcaaccactccaaaaccagacaaggagaagaacacagaagaaaatgactcagaaaaacagcgtaagtctaaagttgaagacaaaccttttgaagaaactggtgttgaacctgtattagagactgcttcttcttcagcacatagtacacagaaggattctagtcatagagccaagttaccattagcaaaggagaaatataagagtgataaagactccacttccaccaggcttgagagaaagttgtcagatggccacaaaagcagaagcttaaagcatagtagtaaaaacataaaaaaaaaggacgaaaataaatcagatgacaaggatggtaaagaagttgacagtagtcatgaaaaggccagaggtaatagttcactcatggaaaagaaattaagtagaaggttgtgcgaaaatcggagaggaagcttgtcacaagaaatggccaaaggagaagaaaaattagcagcaaacactttgagcactcccagcggttcctcccttcagagaccaaaaaagagtggtgatatgacattgatccctgaacaagagccaatggaaattgattctgagccaggtgttgaaaatgtgtttgaagtatctaaaacccaagacaaccgcaataataattctcagcaagacattgactctgaaaatatgaaacaaaaaacttctgccactgttcaaaaggatgaattgagaacttgcacagcagattcaaaagcaacagctccagcttataagccaggccgtggaacaggagttaatagtaattctgaaaagcatgccgatcatagaagcaccttgaccaagaaaatgcatatacaaagtgctgtgtccaaaatgaaccctggggagaaagaacccattcatagaggaactactgaagtgaatatagattctgaaactgttcatagaatgttactgagtgccccatcagaaaatgatagggtacagaagaatttgaaaaacacagctgctgaagaacatgttgctcaaggagatgccactcttgaacattccacaaatttagactcctcaccatccttaagttcagtgactgttgtgcctctgagggaatcgtatgatccagatgtaattcctctgtttgacaaaagaactgttttggaaggtagcacagccagcacctcccctgcggatcactctgctctccctaaccaaagtctgactgttagggaatcagaagtccttaagacaagtgacagcaaagaaggtggtgaaggtttcacagtagatacaccagcaaaagcaagcatcactagcaaaagacacattccagaagctcaccaggctactttattggatggtaaacaaggaaaggtaatcatgcctcttggaagtaagttaacgggcgtgattgtggaaaatgagaatattaccaaagaaggtggcttagtggacatggccaagaaagaaaatgacttaaatgcagagcccaatttaaagcagacaattaaagcaacagtagagaatggcaagaaggatggcattgctgttgatcatgttgtaggcctgaatacagaaaaatatgctgaaactgtcaaacttaagcataaaagaagcccaggtaaagtaaaagacatatcaattgatgttgaaagaaggaatgaaaacagtgaggtagacaccagtgctggaagtggctctgcaccctctgttttacaccaaaggaacggacaaactgaggatgtggcaactgggcctaggagagcagaaaagacttctgttgccactagtactgaagggaaggacaaagatgtcaccttaagtccagtgaaggctgggcctgccacaaccacttcttcagaaacaagacaaagtgaggtggctttgccttgcaccagcattgaggcagatgaaggcctcataataggaacacattccagaaataatcctcttcatgttggtgcagaagccagtgaatgcactgtttttgctgcagctgaagaaggtggggctgttgtcacagagggatttgctgaaagtgaaaccttcctcacaagcactaaggaaggggaaagtggggagtgtgctgtggctgaatctgaggacagagcagcagacctactggctgtgcatgcagttaaaatcgaagccaatgtaaatagcgttgtgacagaggaaaaggatgatgctgtaaccagtgcaggctctgaagaaaaatgtgatggttctttaagtagagactcagaaatagttgaaggaactattacttttattagtgaagttgaaagtgatggagcagttacaagtgctggaacagagataagagcaggatctataagcagtgaagaggtggatggctcccagggaaatatgatgagaatgggtcccaaaaaagaaacagagggcactgtgacatgtacaggagcagaaggcagaagtgataactttgtgatctgctcagtaactggagcagggccccgggaggaacgcatggttacaggtgcaggtgttgtcctgggagataatgatgcaccaccaggaacaagtgccagccaagaaggagatggttctgtgaatgatggtacagaaggtgagagtgcagtcaccagcacggggataacagaagatggagaggggccagcaagttgcacaggttcagaagatagcagcgaaggctttgctataagttctgaatcggaagaaaatggagagagtgcaatggacagcacagtggccaaagaaggcactaatgtaccattagttgctgctggtccttgtgatgatgaaggcattgtgactagcacaggcgcaaaagaggaagacgaggaaggggaggatgttgtgactagtactggaagaggaaatgaaattgggcatgcttcaacttgtacagggttaggagaagaaagtgaaggggtcttgatttgtgaaagtgcagaaggggacagtcagattggtactgtggtagagcatgtggaagctgaggctggagctgccatcatgaatgcaaatgaaaataatgttgacagcatgagtggcacagagaaaggaagtaaagacacagatatctgctccagtgcaaaagggattgtagaaagcagtgtgaccagtgcagtctcaggaaaggatgaagtgacaccagttccaggaggttgtgagggtcctatgactagtgctgcatctgatcaaagtgacagtcagctcgaaaaagttgaagataccactatttccactggcctggtcgggggtagttacgatgttcttgtatctggtgaagtcccagaatgtgaagttgctcacacatcaccaagtgaaaaagaagatgaggacatcatcacctctgtagaaaatgaagagtgtgatggtctcatggcaactacagccagtggtgatattaccaaccagaatagcttagcagggggtaaaaatcaaggcaaagttttgattatttccaccagtaccacaaatgattacacccctcaggtaagcgcaattacagatgtggaaggaggtctctcagatgctctgagaactgaagaaaatatggaaggtaccagagtaaccacagaagaatttgaggcccccatgcccagtgcagtctcaggagatgacagccaactcactgccagcagaagtgaagagaaagatgagtgtgccatgatttccacaagcataggggaagaattcgaattgcctatctccagtgcaacaaccatcaagtgtgctgaaagtcttcagccggttgctgcagcagtggaagaaagggctacaggtccagtcttgataagcaccgccgactttgaggggcctatgcccagtgcgcccccagaagctgaaagtcctcttgcctcaaccagcaaggaggagaaggatgaatgtgctctcatttccactagcatagcagaagaatgtgaggcttctgtttccggtgtagttgttgaaagtgaaaatgagcgagctggcacagtcatggaagaaaaagacgggagtggcatcatctctacgagctcggtggaagactgtgagggcccagtgtccagtgctgtccctcaagaggaaggcgacccctcagtcacaccagcggaagagatgggtgacaccgccatgatttccacaagcacctctgaagggtgtgaagcagtcatgattggtgctgtcctccaggatgaagatcggctcaccatcacaagagtagaagacttgagcgatgctgccatcatctccaccagcacagcagaatgtatgccaatttccgccagcattgacagacatgaagagaatcagctgactgcagacaacccagaagggaacggtgacctgtcagccacagaagtgagcaagcacaaggtccccatgcccagcctaattgctgagaataactgtcggtgtcctgggccagtcaggggaggcaaagaaccgggtcccgtgttggcagtgagcaccgaggaggggcacaacgggccatcagtccacaagccctctgcagggcaaggccatccaagtgctgtttgtgcggaaaaagaagagaagcatggcaaggagtgccccgaaataggaccatttgcaggaagaggacagaaagagagcactttacacctcataaatgcagaagagaagaatgtattgttgaactcccttcagaaagaagataagagcccagagacagggacagcagggggcagtagcacagcaagttattcagcaggaaggggcttagaggggaatgctaactcacctgcccacctgagaggaccagaacagacgtctgggcagacggctaaggattcctctgtcagcagcattcgctatttggcagcagtaaacaccggtgctataaaagctgatgacatgccacctgttcaagggaccgtggctgagcattcctttcttcctgctgagcagcaggggtctgaagacaacttgaaaaccagtaccaccaaatgtattactggccaagaatcaaaaattgctccttcccacacaatgatccctccagctacttacagtgtagctctgttggctcctaaatgtgagcaggacttgactataaagaatgattatagtggcaaatggactgatcaagcatctgctgagaaaacaggagatgataacagcacaaggaaatcattccctgaggaaggagacataatggttactgtgtcttctgaagaaaatgcttatgtgccttcagaggaagagaaaaatggtgaaattctggcaccaccagaaagtctgtgtgggggaaagccaagtggaatagagatatccagtggtagaaaagacaacgcagaagccataagcggtcacagtgttgaagcagatcctaaagaggaagagaactccagagatttggaagaattacctaaaaccagttctgagacaaatagcactacctcaagggtcatggaagaaaaagatgaatatagcagcagtgaaactactggtgaaaagccagagcagaacgatgatgacaccataaaatctcaggaggatgatggtgaagaaaaaatagtaacaagtgtgcgtcggagaggaagaaaacccaaacgttctctcactgtatcagatgatgctgaatcctcagagccagaaagaaaacgccagaaatcagtttctgatccagtggaggacaagaaagagcaggagtctgatgaggaagaggaagaagaggaagaggacgagccttcaggagccaccacaagatccaccaccagatcagaggctcagagatcaaagacacagctctccccttctatcaagcgcaagagagaagtcagccctcctggggcccgaacaagaggccagcaaagggtggaggaagcccctgtgaaaaaagcgaagcgataatcctgaccactgctgccctaggcttatggaggaacacggtggagaggaaagagacatgccttggtggccataggcttctctttaaccaggaaaaagatatgcatgtgctgtaagtccctagggtgcaagctttttcttgttatgttttaaacagctttataaactattgttg

SEQ ID NO: 128 - DNA, 1573 bp, Homo sapiens
  CDS (185)..(1573)
attgataccctgcagtaccgctccggaattcccgggtcgacccacgcgtccgagcggaagtggacgaatttgaatcctgtgggccgttgaatgtggctgctcgcggtcggcgtgccccgacgtacagcgggccgggaaaagtggcactgaggctctggaacttctgcccagctctccttgtaaaatgaatgaaagtaaacctggtgactcacagaaccttgcttgtgttttctgtcgaaaacatgatgactgtcctaataaatacggagaaaagaaaactaaggagaaatggaatctcactgtacattactactgtttgttgatgtcaagtggaatttggcagagaggcaaagaagaagaaggagtttatggttttctaatagaagatatcaggaaggaagtgaatagagcttctaaactggttcaagcaataaatgcgggagtgtttttctttaggtgtacaatatgcaataatagtgacatctttcagaaagagatgttgagaatgggaattcatattcctgaaaaagatgcttcctgggaattagaggaaaacgcttatcaagagcttctgcagcactatgagcgttgtgatgttcgaagatgtcgttgcaaagaagggcgagactataatgcacctgacagcaaatgggaaataaagcgctgtcagtgttgtggttccagtggcacacatttagcctgctcctcattacggtcatgggagcaaaattgggagtgtttggaatgtaggggtattatctacaattcagctctgaaagagaatctttactatgaagctggcaaaatgcttgccatttctttagttcacggtggtccttcacctggtttcttttctaaaaccttgtttaactgccttgtttatggaccagaaaatacccagccaattttagatgatgtttcagactttgatgtggcacagattataatcaggataaatactgcaacaactgtagctgacttaaagtcaataataaatgaatgctataactaccttgagttaattggatgtctcagacttataacgacattaagtgataaatatatgttagtaaaagacatacttggctaccatgtaattcagagagtccacacaccctttgaaagttttaagcagggtctgaaaacccttggtgttttggagaaaattcaggcttatccagaagcattttgtagcatcctgtgtcataaacctgagagtctttctgcaaaaatccttagtgagctttttacagtacacacattacctgatgtgaaagctttggggttttggaacagttacttacaggctgttgaagatggtaaatctacaacaacaatggaagacattcttatttttgcaactggttgcagttccattcctccagctggatttaaacccactccttcaattgagtgtctgcatgtggattttcctgttggaaacaagtgtaataactgtttagcaattcccatcaccaatacatataaagagtttcaagaaaatatggacttcaccataagaaacactctaagactagaaaaggaagaaagttctcattacattggacattaa

SEQ ID NO: 129 - DNA, 3158 bp, Homo sapiens
  CDS (100)..(1815)
ccggctacgggtccccaagcggagcgggaggccggaccggggagccgagcggcggcgtcggcggcgtcggcggcggcggcgacggcggcgggggcggtaatggcggagctggtgcaggggcagagcgctcctgtggggatgaaggccgagggcttcgtggatgccctgcaccgggtccggcagattgctgctaaaattgattcaattcctcacttgaataattccacacctctagtggacccctcagtatatggatacggagtacaaaaacggcccttggatgatggaggtaaccagttaggggccttggtacatcaaaggacggtaataacggaagaattcaaagtgcctgacaaaatggttggatttattatcggcaggggaggtgagcagatttcacggattcaagcagaatctggttgcaaaattcagattgcttcagagagttctgggattccagagaggccctgtgtacttaccggaaccccagaaagtattgaacaagccaaacggctcctgggacagattgtggaccgctgtcgaaatggacctggctttcataatgacatagacagcaacagcacaatccaggagattctcattcccgcatctaaagtgggtctggtcatcggcagaggaggggaaacaatcaagcagttgcaggagcggacaggggtgaagatggtcatgatccaggatggcccattgcccacgggagcagacaagcctcttcgtatcactggagatgcatttaaagtacagcaagcaagagaaatggtactagagattatccgagaaaaagaccaagctgactttcggggtgtacgcggcgatttcaactctcgaatgggaggaggcagtatagaggtatctgtgcctaggtttgctgtggggattgtaataggaagaaacggggaaatgatcaaaaagatccagaatgatgctggtgtgaggattcagtttaaaccagatgatgggattagtccagaaagagctgcccaggtcatgggccctccggatcggtgtcagcatgcagcgcatatcatcagcgagctgattcttacagcccaggaaagagacggctttggaggcctggcagcagccagaggaagaggtcgtggccgtggcgactggagcgtgggagcccctggtggcgtccaggagataacatacacggtgccagccgataagtgtggcctcgtcataggcaaagggggtgagaacatcaaaagcatcaaccagcagtcaggggcgcacgtggagcttcagaggaacccccctcccaacagcgaccccaacctgcggagattcaccatcaggggggttccccagcagatcgaggtggccaggcagctcatagatgagaaagttggcgggaccaatctcggagcacctggagccttcggacagagtccattcagccagccacctgccccacctcatcaaaatacctttcctccaaggagctccgggtgcttcccaaacatggctgccaaggtgaatgggaacccccacagcacccctgtgagtggtcctccggcctttctgacccagggctggggcagcacctaccaggcgtggcagcagcccacacagcaggtcccaagccagcagagccagccgcagagcagccagcccaactacagcaaggcctgggaagactattacaaaaaacagagtcacgccgccagcgctgctcctcaggccagctccccaccggactacacaatggcctgggcagaatattacagacagcaggtcgctttctacggacagacgttagggcaggcgcaggcccacagccaggagcagtaggacagcgtcctcgtggccaactctcccctcaaaatcattgtcaaagaaaacctatttgtaacagaggtttttacatttgcaaaccttttgatgaagaactgttgttttgttctgtgaaacactatatttagattaacggaatttttctaaaaatcaggaaaattagttactaaaaattgctgatcatttttgtttcattatttttgttatttcaaatgtataagctctgggattctttttggagcaatacctacaaagtcaggcaccagaatgtgcctcagagctgtgacatttcaacatgatggttttggtttggtttggttttgtgtcctttttatttgcagttttttctgttgcaacagaaagtggcttggaagtcttaggtggtatgtaacaaattctttttaaaaattttaaagcagtatttaagtattcttaaatgtgtaaattcatttaatgttttacttctaatttcttgtatcttggctgtctggttttattgcatttttaaaaaaactgaactattatgtattgtaatgaatgatgtgaattctgaactgagacagataattgtattgctgtccaacaggggttgggaggggcattttgtagggtttgtataatttctagagttcgaaaggggtaatataaaaatgtgctcgtgtgtttagcctacgtttttctcatgcctccattaccagttgcaattgtgtatctaagacctccaagcttgtttttaaaacaaaacaaaaaacctttctctattatctcagaaatataaatactgttatttttaatattaagaaattcaatataacttttaacacacactgtggaacattaaaccgtataaaaatgtagttataactatttttaattccaaggtgttgtttgcttttttcttttaaatattttcttaatattttgtcagattaactagatgaataaataaatctagtattaaccgcattatgaattaaataattttgatttaatgaaagggataatatgatttccagtgtttactgtagtgtatcttgtacagataacatgtatttttaaaggaaaaaaaacggaattgaagctattttttcttgcatttctaattgacctgagggacattccgtttgaaatgtactgaagttacagtttctggttttttctccttatttttcttataatgcttgaaatgtctaactattaaaaaagacaattggaaaatgttatgcatggggtttttaagaaaacaaagtgttctttttatttgactgacaattcattttacactctatataataaaatctccacaaggcatcttgtgggcaaagtcaaaaaaaaaaaaa

SEQ ID NO: 130 - DNA, 3236 bp, Homo sapiens
  CDS (133)..(2883)
tttgaaaatgtgttttttgaggtggaatacccaactgacccctcatctctcctctctctctgctgccctgcagtgctacagttgaaactccagcagcgccggacccgggaagaactggtgagccaagggatcatgccgcctttgaaaagtccagccgcatttcatgagcagagaaggagcttggagcgggccaggacagaggactatctcaaacggaagattcgttcccggccggagagatcggagctggtcaggatgcacattttggaagagacctcggctgagccatccctccaggccaagcagctgaagctgaagagagccagactagccgatgacctcaatgagaagattgcacagaggcctggccccatggagctggtggagaagaacatccttcctgttgagtccagcctgaaggaagccatcattgtgggccaggtgaactatcccaaagtagcagacagctcttccttcgatgaggacagcagcgatgccttatcccccgagcagcctgccagccatgagtcccagggttctgtgccgtcacccctggaggcccgagtcagcgaaccactgctcagtgccacctctgcatcccccacccaggttgtgtctcaacttccgatgggccgggattccagagaaatgcttttcctggcagagcagcctcctctgcctcccccacctctgctgcctcccagcctcaccaatggaaccactatccccactgccaagtccacccccacactcattaagcaaagccaacccaagtctgccagtgagaagtcacagcgcagcaagaaggccaaggagctgaagccaaaggtgaagaagctcaagtaccaccagtacatccccccggaccagaagcaggacaggggggcaccccccatggactcatcctacgccaagatcctgcagcagcagcagctcttcctccagctgcagatcctcaaccagcagcagcagcagcaccacaactaccaggccatcctgcctgccccgccaaagtcagcaggcgaggccctgggaagcagcgggacccccccagtacgcagcctctccactaccaatagcagctccagctcgggcgcccctgggccctgtgggctggcacgtcagaacagcacctcactgactggcaagccgggagccctgccggccaacctggacgacatgaaggtggcagagctgaagcaggagctgaagttgcgatcactgcctgtctcgggcaccaaaactgagctgattgagcgccttcgagcctatcaagaccaaatcagccctgtgccaggagcccccaaggcccctgccgccacctctatcctgcacaaggctggcgaggtggtggtagccttcccagcggcccggctgagcacggggccagccctggtggcagcaggcctggctccagctgaggtggtggtggccacggtggccagcagtggggtggtgaagtttggcagcacgggctccacgccccccgtgtctcccaccccctcggagcgctcactgctcagcacgggcgatgaaaactccacccccggggacacctttggtgagatggtgacatcacctctgacgcagctgaccctgcaggcctcgccactgcagatcctcgtgaaggaggagggcccccgggccgggtcctgttgcctgagccctggggggcgggcggagctagaggggcgcgacaaggaccagatgctgcaggagaaagacaagcagatcgaggcgctgacgcgcatgctccggcagaagcagcagctggtggagcggctcaagctgcagctggagcaggagaagcgagcccagcagcccgcccccgcccccgcccccctcggcacccccgtgaagcaggagaacagcttctccagctgccagctgagccagcagcccctgggccccgctcacccattcaaccccagcctggcggccccagccaccaaccacatagacccttgtgctgtggccccggggcccccgtccgtggtggtgaagcaggaagccttgcagcctgagcccgagccggtccccgccccccagttgcttctggggcctcagggccccagcctcatcaagggggttgcacctcccaccctcatcaccgactccacagggacccaccttgtcctcaccgtgaccaataagaatgcagacagccctggcctgtccagtgggagcccccaggagatggacctggagcacccactgcagcccctctttgggacccccacttctctgctgaagaaggaaccacctggctatgaggaagccatgagccagcagcccaaacagcaggaaaatggttcctcaagccagcagatggacgacctgtttgacattctcattcagagcggagaaatttcagcagatttcaaggagccgccatccctgccagggaaggagaagccatccccgaagacagtctgtgggtcccccctggcagcacagccatcaccttctgctgagctcccccaggctgccccacctcctccaggctcaccctccctccctggacgcctggaggacttcctggagagcagcacggggctgcccctgctgaccagtgggcatgacgggccagagcccctttccctcattgacgacctccatagccagatgctgagcagcactgccatcctggaccaccccccgtcacccatggacacctcggaattgcactttgttcctgagcccagcagcaccatgggcctggacctggctgatggccacctggacagcatggactggctggagctgtcgtcaggtggtcccgtgctgagcctagcccccctcagcaccacagcccccagcctcttctccacagacttcctcgatggccatgatttgcagctgcactgggattcctgcttgtagctctctggctcaagacggggtggggaaggggctgggagccagggtactccaatgcgtggctctcctgcgtgattcggcctctccacatggttgtgagtcttgacaatcacagcccctgctttttcccttccctgggaggctagaacagagaagcccttactcctggttcagtgccacgcagggcagaggagagcagctgtcaagaagcagccctggctctcacgctggggttttggacacacggtcagggtcagggccatttcagcttgacctccttttttgaggtcagggggcactgtctgtctggctacaatttggctaaggtaggtgaagcctggccaggcgggaggctt

SEQ ID NO: 131 - DNA, 537 bp, Homo sapiens
  CDS (242)..(475)
cttttgagccccgccccctccattggcgcgccctcgccatcccccgccctggcacgcgctctgcgcatgcgtacgctcgctggccccgccccctagcgccgcggtcgacgccatttcgccgattcctccatgcgagttgctgtgcgtttctctgttgtctcggtagaaggccagagtcacacacggtcctaagagctgggcaccaggaagcgaaggctgatctgaagaagacacttgaatcatgggtgacgttaaaaattttctgtatgcctggtgtggcaaaaggaagatgaccccatcctatgaaattagagcagtggggaacaaaaacaggcagaaattcatgtgtgaggttcaggtggaaggttataattacactggcatgggaaattccaccaataaaaaagatgcacaaagcaatgctgccagagactttgttaactattcgggtcgaataaatgaaatagacatgtgagaaagatcaccttttggggaaccctgttctgccgcgttactgttactactggcagtagggca

SEQ ID NO: 132 - DNA, 1203 bp, Homo sapiens
  CDS (43)..(801)
gtccagtgcggtggaattcctctccgcatcaaagtcatctccatgggcaacgccgaagtggggaaaagctgtattataaagcgatactgtgagaaaagattcgtgtctaaatacctggcaacaattggaattgactatggagtcacaaaggtacacgtcagagacagagaaatcaaagttaacatctttgatatggctggacatcccttcttctatgaggttcgaaatgagttttacaaggacacacagggtgtgatactggtctatgatgttgggcagaaagactcctttgacgcccttgatgcgtggctggcagaaatgaagcaagagcttggacctcatggaaacatggaaaatattatatttgtagtttgtgccaacaagattgattgtaccaaacatcgctgtgtagatgaaagtgaaggacgtctttgggctgaaagcaaagggttcctgtactttgaaacttcagcacaaactggagaaggcattaatgagatgttccagaccttttatatatccatagttgatttatgtgaaaatggcgggaaacgccctaccaccaatagcagtgctagtttcaccaaagaacaagcagatgccattcgcagaattcgaaatagtaaagacagttgggacatgctgggagtcaaacctggggcctcaagggatgaagtcaataaagcgtatcggaaacttgctgtgcttcttcaccctgacaaatgtgtagcacctggcagtgaagatgccttcaaagcagttgtgaatgctcggacagccctcctgaaaaacatcaagtagaaagtacagaaaaaagccacatgtgggactcaaatgcaaacagactttccctagaggtgaaataaccaacgtggagttttccttcccagaatctcactgctcttttcattcatgtgttgtcatttgtatatcagtaattcaggtacccatttcatagacattttactgagaaatgacctgcatttgtatgaagtgaactgagcgtcacaccctgtacttcatttcatatttctagataattctgaatttttttctcattcgtcagctctgtaattatagtatcacttagacatttcacttggggaaatccacaaggttcctggaggagggaagagaggacaagaggaccctttcactttttcttttttacggaattcatcatcagagaagaaaaaaaaaaaa

SEQ ID NO: 133 - DNA, 746 bp, Homo sapiens
  CDS (235)..(426)
gcacaggtctggggctttttgcaggcgggcctggggtctcagtggaggggacaaaggcaagcaaaagcccatgtccaggagccctgggtgtccccacaggctcgcctctgagagcctctttggggtgagcagccttgtattggccacaggtgcactaaattgactgtgaatcccaaacctccccagaccaggcaggccgcctgcccccacccagaaccttccggtttgccctgtatggaaagccactctcggaaatccctctttcctgagtcagcaatcgtggcaaggggacatgtgttccaacagcggctggggagtggacctctctgtcccttgcccaccttaagccccaaatccggaccccctctgacatcactggcattgcacctgggtgtgcccccctccccacgctatggacccagataggaggggttaggcatgggggaggcacagaatgctggagagatgcgtcctggtgaacgtggggcagcccctcccacgacccccaccagactgccttaggttttgtcagccccactccctttccttcccctctgcctcccacccactctgggggtccacatcaagatagctgggcccagtgtggaagcccaacgtgtctgttctagcagaaaggacacaagcctggtgttctggagacctcggctcaagtctttgccctgctgccgacgcattgtgtcaccttgggcaaggatttcgcatctccaggcctcagtttccccatt

SEQ ID NO: 134 - DNA, 4895 bp, Homo sapiens
  CDS (1)..(4785)
atggggtttcaccatgttggccacgctggtctcgaacacctgacctcaggtgacaggctgggaaggagatcctcaagcaagcgggctctcaaagccgaggggaccccaggcaggcgcggagctcagcgaagccagaaggagcgcgccgggggcagcccaagcccggggtctccccggaggaagcaaacagggcgcaggagacacagagaagagctgggggagcaggagcggggcgaggcagagaggacctgcgagggcaggagaaagcgcgacgagagggcctccttccaggagcggacagcagccccaaagagggaaaaggagattccgaggagggaggagaagtcgaagcggcagaagaaacccaggtcatcctccttggcctccagtgcctctggtggggagtccctgtccgaggaggaactggcccggatcctggagcaggtggaagaaaaaaagaagctcattgccaccatgcggagcaagccctggcccatggcgaagaagctgacagagctcagggaggcccaggaatttgtggagaagtatgaaggtgccttgggaaaggggaaaggcaagcaactatatgcctacaagatgctgatggccaagaaatgggtcaaatttaagagagactttgataatttcaagactcaatgtatcccctgggaaatgaagatcaaggacattgaaagtcactttggttcttcagtggcatcgtatttcatctttctccgatggatgtatggagttaaccttgtcctttttggcttaatatttggtctagtcataatcccagaggatgtctacgtgatccctgaggaaccctcagttatgctgcaggagctggctggcaaggccccactggatgacaagtttatgtacttctcttccaacactggatcctacggtctaggttttgaccaaggctacaattatcttgaggctgaactgaagaagatccgcttccaagctcactcacatggctactggcagatctcagaagatacaatttcaagcttactcacgtggcttctggcaggcctcagaaaatctgcttccaaccttacttatgtggctgttcccaaggttcagggctatatcaagtactctgcactcttctatggctactacaacaaccagaggaccatcgggtggctgaggtaccggctgcctatggcttactttatggtgggggtcagcgtgttcggctacagcctgattattgtcattcgatcgatggccagcaatacccaaggaagcacaggcgaaggggagagtgacaacttcacattcagcttcaagatgttcaccagctgggactacctgatcgggaattcagagacagctgataacaaatatgcatccatcaccaccagcttcaaggaatcaatagtggatgaacaagagagtaacaaagaagaaaatatccatctgacaagatttcttcgtgtcctggccaactttctcatcatctgctgtttgtgtggaagtgggtacctcatttactttgtggttaagcgatctcagcaattctccaaaatgcagaatgtcagctggtatgaaaggaatgaggtagagatcgtgatgtccctgcttggaatgttttgtccccctctgtttgaaaccatcgctgccctggagaattaccacccacgcactggactgaagtggcagctgggacgcatctttgcactcttcctggggaacctctacacatttctcttggccctgatggatgatgtccacctcaagcttgctaatgaagagacaataaagaacatcactcactggactctgtttaactattacaactcttctggttggaacgagagtgtcccccgaccacccctgcaccctgcagatgtgccccggggttcttgctgggagacagctgtgggcattgaattcatgaggctgacggtgtctgacatgctggtaacgtacatcaccatcctgctgggggacttcctacgggcttgttttgtgcggttcatgaactactgctggtgctgggacttggaggctggatttccttcatatgctgagtttgatattagtggaaatgtgctgggtttgatcttcaaccaaggaatgatctggatgggctccttctatgctccaggcctggtgggcattaatgtgctgcgcctgctgacctccatgtacttccagtgctgggcggtgatgagcagcaacgtaccccatgaacgcgtgttcaaagcctcccgatccaacaacttctacatgggcctcctgctgctggtgctcttcctcagcctcctgccggtggcctacaccatcatgtccctcccaccctcctttgactgcgggccgttcagtgggaaaaacagaatgtacgatgtcctccaagagaccattgaaaacgatttcccaaccttcctgggcaagatctttgctttcctcgccaatccaggcctgatcatcccagccatcctgctgatgttcttggccatttactacctgaactcagtttccaaaagcctttcccgagctaatgcccagctgaggaagaaaatccaagtgctccgtgaagttgagaagagccacaaatctgtaaaaggcaaagccacagccagagattcagaggacacacctaaaagcagctccaaaaatgccacccagctccaactcaccaaggaagagaccactcctccctctgccagccaaagccaggccatggacaagaaggcgcagggccctgggacctccaattctgccagcaggaccacactgcctgcctctggacaccttcctatatctcggccccctggaatcggaccagattctggccacgccccatctcagactcatccgtggagacagagcctgggcctgggcctgggcctgggcctgggcctgggcctgcgcctgcgcctgccctgggaacgggttccggcagacgctgaggttgcgttgacgctcgcgccccggctcccgttccaggtgctgttgcacgtgctgtttgagcacgcggtcggctacgcgctgctggcgctgaaggaagtggaggagatcagtctgctgcagcccgcagcatgcacagcgcgctcccacgtggccggccgaccggtggaggagtccgtgctcaacctgggcaaattccacagcatcgttcgtctggtggccttttgtccctttgcctcatcccaggttgccttggaaaatgccaacgccgtgtctgaaggggttgttcatgaggacctccgcctgctcttggagacccacctgccgtccaaaaagaagaaagtactcttgggagttggggatcccaagattggtgccgcaatacaggaggagttagggtacaactgccagactggaggagtcatagctgagatcctgcgaggagttcgtctgcacttccacaatctggtgaagggtctgaccgatctgtcagcttgtaaagcacagctggggctgggacacagctattcccgtgccaaagttaagtttaatgtgaaccgggtggacaatatgatcatccagtccattagcctcctggaccagctggataaggacatcaataccttctctatgcgtgtcagggagtggtacgggtatcactttccggagctggtgaagatcatcaacgacaatgccacatactgccgtcttgcccagtttattggaaaccgaagggaactgaatgaggacaagctggagaagctggaggagctgacaatggatggggccaaggctaaggctattctggatgcctcacggtcctccatgggcatggacatatctgccattgacttgataaacatcgagagcttctccagtcgtgtggtgtctttatctgaataccgccagagcctacacacttacctgcgctccaagatgagccaagtagcccccagcctgtcagccctaattggggaagcggtaggtgcacgtctcatcgcacatgctggcagcctcaccaacctggccaagtatccagcatccacagtgcagatccttggggctgaaaaggccctgttcagagccctgaagacaaggggtaacaccccaaaatatggactcattttccactccaccttcattggccgagcagctgccaagaacaaaggccgcatctcccgatacctggcaaacaaatgcagtattgcctcacgaatcgattgcttctctgaggtgcccacgagtgtattcggggagaagcttcgagaacaagttgaagagcgactgtccttctatgagactggagagataccacgaaagaatctggatgtcatgaaggaagcaatggttcaggcagaggaagcagctgctgagattactaggaagctggagaaacaggagaagaaacgcttaaagaaggaaaagaaacggctggctgcacttgccctcgcgtcttcagaaaacagcagtagtactccagaggagtgtgaggagatgagtgaaaaacccaaaaagaagaaaaagcaaaagccccaggaggttcctcaggagaatggaatggaagacccatctatctctttctccaaacccaagaaaaagaaatctttttccaaggaggagttgatgagtagcgatcttgaagagaccgctggcagcaccagtattcccaagaggaagaagtctacacccaaggaggaaacagttaatgaccctgaggaggcaggccacagaagtggctccaagaaaaagaggaaattctccaaagaggagccggtcagcagtgggcctgaagaggcggctggcaagagcagctccaagaagaagaaaaagttccataaagcatcccaggaagattagaatgcaaatggacattctctgggaggtggggcataccatagcccaaggtgacatttcccaccctgtgccgtgttccccaataaaaacaaattcacaagaaaaaaaaaaaa

SEQ ID NO: 135 - DNA, 2418 bp, Homo sapiens
  CDS (486)..(1769)
ttttgaaagctgtacgcctgcaggtaccggtccggaattcccgggtcgacgatttcgtggcggagaccgtctggagcactgacaccggggaggcagtgtatcgctcccgggaccccgtgcgcaacttgcgcctccgagtccacctgcaaagaatcacatcaagcaactttcttcattatcagcctgctgccgagctcgggaaggacctcatagacttggccacttttaggcctcagccaactgccagtggacaccgcccagaggaagacgaagaggaggagattgtgattgggtggcaggagaagctctttagccagtttgaagtagatctgtaccaaaatgaaacagcctgtcagagtcctttggattatcagtaccgtcaggagatcctgaagctggagaattcgggtggcaagaaaaaccgacgaatctttacctacactgactctgatagatacaccaatttggaggagcactgtcagagaatgaccactgcagccagcgaggtgccttcattcttggtcgagcgaatggcaaatgtcaggcgtcgccggcaggacaggcgagggatggagggcggcatcctcaagtcacgcatcgtcacctgggagccctcagaagagtttgtcaggaacaaccacgtcattaacacccctcttcagacaatgcacatcatggcagacctggggccctataaaaagcttggctataagaagtatgaacatgtcctgtgtactctgaaggtggatagcaatggtgtgatcacagtaaagcctgacttcacgggcctcaaaggaccctacaggattgagacggagggggagaagcaggagctgtggaaatatacgatcgacaatgtttccccccacgcacagccggaggaggaggagcgggaacggcgagtgttcaaggatctttatggccggcacaaggagtatctcagcagcctcgtaggcaccgactttgagatgactgtcccaggtgccctccggctctttgtaaatggagaggtcgtttcagcccaaggctatgagtatgacaatctctacgtccacttctttgtagaattgccaactgctcgcgagcttactatatttggtctttggctttcagactggtcaagcccagcattccagcagctctcaggagtaacacagacctgcaccaccaagtccctggcaatggacaaggtggctcacttctcctacccattcacgtttgaagccttcttcctccatgaggatgaatcttctgatgcactcccggagtggcctgtgctctactgtgaggtcctctcgctggacttctggcagaggtaccgtgtggaaggctatggggctgtggtgctgcctgccactccaggctcacacaccctgacagtctccacgtggagacctgtggagcttggcacggtggctgagctgaggaggtttttcattggcggttctctggaactggaggacctctcctatgtacggataccaggatccttcaagggggaacgcctgagccgctttggactccgcacagagaccacaggcactgtcaccttccgcttgcactgtctgcagcagtccagggccttcatggaatcgagctcccttcagaaaaggatgcggagtgtgttggaccgtctggaagggttcagccagcagagttccattcacaatgtgctagaggccttccgtcgagcccggcgccgcatgcaggaggcccgggaaagcctcccgcaggacctagtgagcccctctggaaccctggtctcctagctcacagcagccctggcccacagtgcaagaggacaagatgggggatatctgaggccagtgctctcctgcctcttcgtctttctgattagagaccacgttggtctgctgagaaccagaaaagctgggaaattcccggctggcccctctgcctagccttctgcagggtcttctccctaccctgtggaaataaagccagagaccctgtggccccccctttatatttgcagccactgtcaatgggcatcacagcaaggcaggctttttgatctgaagctgtttggggtgaccccatagtgagtctggccttgactcacttttctggcttgtctcacagtagcaggggatctgctgttctccaccctttaaaaatggagcctttcatcttccaagaccaaagaaggaaggaaggtggacggtgagagggtcttaaatccccagcctgtgagtctcagcctctttccagggaagcctcattctactgcttggggcttgctgaggttgagatatgagttatttctgagtaagtgaaggctgaaggcagtgctgagtcctttctgctagctgggtggtatcttttactgtgtttttttgtttgtttgtttttttgttttttgttacataaaccccttttattttgaaaaaaaaaaaa

SEQ ID NO: 136 - DNA, 1518 bp, Homo sapiens
  CDS (486)..(1355)
ttttgaaagctgtacgcctgcaggtaccggtccggaattcccgggtcgacgatttcgtggcggagaccgtctggagcactgacaccggggaggcagtgtatcgctcccgggaccccgtgcgcaacttgcgcctccgagtccacctgcaaagaatcacatcaagcaactttcttcattatcagcctgctgccgagctcgggaaggacctcatagacttggccacttttaggcctcagccaactgccagtggacaccgcccagaggaagacgaagaggaggagattgtgattgggtggcaggagaagctctttagccagtttgaagtagatctgtaccaaaatgaaacagcctgtcagagtcctttggattatcagtaccgtcaggagatcctgaagctggagaattcgggtggcaagaaaaaccgacgaatctttacctacactgactctgatagatacaccaatttggaggagcactgtcagagaatgaccactgcagccagcgaggtgccttcattcttggtcgagcgaatggcaaatgtcaggcgtcgccggcaggacaggcgagggatggagggcggcatcctcaagtcacgcatcgtcacctgggagccctcagaagagtttgtcaggaacaaccacgtcattaacacccctcttcagacaatgcacatcatggcagacctggggccctataaaaagcttggctataagaagtatgaacatgtcctgtgtactctgaaggtggatagcaatggtgtgatcacagtaaagcctgacttcacgggcctcaaaggaccctacaggattgagacggagggggagaagcaggagctgtggaaatatacgatcgacaatgtttccccccacgcacagccggaggaggaggagcgggaacggcgagtgttcaaggatctttatggccggcacaaggagtatctcagcagcctcgtaggcaccgactttgagatgactgtcccaggtgccctccggctctttgtaaatggagaggtcgtttcagcccaaggctatgagtatgacaatctctacgtccacttctttgtagaattgccaactgctcactggtcaagcccagcattccagcagctctcaggagtaacacagacctgcaccaccaagtccctggcaatggacaaggtggctcacttctcctacccattcacgtttgaagccttcttcctccatgaggatgaatcttctgatgcactcccggagtggcctgtgctctactgtgaggtcctctcgctggacttctggcagaggtaccgtgtggaaggctatggggctgtggtgctgcctgccactccagcgacaatgacgtggccttggcactgacttcctgacagtctctccatgtgcttcatgctcctctgattggactcagggtgagaagctgtatggcaaaattggctcatagcatatgtgtattgaatgaatcagcattcagtttggaataaaagcatctgtcttttactgtgaaaaaaaaaaaaaaaaaaaa

SEQ ID NO: 137 - DNA, 1862 bp, Homo sapiens
  CDS (4)..(1437)
gacatgacgcccgaggacccagaggaaacccagccgcttctggggcctcctggcggcagcgcgccccgcggccgccgcgtcttcctcgccgccttcgccgctgccctgggcccactcagcttcggcttcgcgctcggctacagctccccggccatccctagcctgcagcgcgccgcgcccccggccccgcgcctggacgacgccgccgcctcctggttcggggctgtcgtgaccctgggtgccgcggcggggggagtgctgggcggctggctggtggaccgcgccgggcgcaagctgagcctcttgctgtgctccgtgcccttcgtggccggctttgccgtcatcaccgcggcccaggacgtgtggatgctgctggggggccgcctcctcaccggcctggcctgcggtgttgcctccctagtggccccggtctacatctccgaaatcgcctacccagcagtccgggggttgctcggctcctgtgtgcagctaatggtcgtcgtcggcatcctcctggcctacctggcaggctgggtgctggagtggcgctggctggctgtgctgggctgcgtgcccccctccctcatgctgcttctcatgtgcttcatgcccgagaccccgcgcttcctgctgactcagcacaggcgccaggaggccatggccgccctgcggttcctgtggggctccgagcagggctgggaagacccccccatcggggctgagcagagctttcacctggccctgctgcggcagcccggcatctacaagcccttcatcatcggtgtctccctgatggccttccagcagctgtcgggggtcaacgccgtcatgttctatgcagagaccatctttgaagaggccaagttcaaggacagcagcctggcctcggtcgtcgtgggtgtcatccaggtgctgttcacagctgtggcggctctcatcatggacagagcagggcggaggctgctcctggtcttgtcaggtgtggtcatggtgttcagcacgagtgccttcggcgcctacttcaagctgacccagggtggccctggcaactcctcgcacgtggccatctcggcgcctgtctctgcacagcctgttgatgccagcgtggggctggcctggctggccgtgggcagcatgtgcctcttcatcgccggctttgcggtgggctgggggcccatcccctggctcctcatgtcagagatcttccctctgcatgtcaagggcgtggcgacaggcatctgcgtcctcaccaactggctcatggcctttctcgtgaccaaggagttcagcagcctcatggaggtcctcaggccctatggagccttctggcttgcctccgctttctgcatcttcagtgtccttttcactttgttctgtgtccctgaaactaaaggaaagactctggaacaaatcacagcccattttgaggggcgatgacagccactcactaggggatggagcaagcctgtgactccaagctgggcccaagcccagagcccctgcctgccccaggggagccagaatccagccccttggagccttggtctgcagggtccctccttcctgtcatgctccctccagcccatgacccggggctaggaggctcactgcctcctgttccagctcctgctgctgctctgaggactcaggaacaccttcgagctttgcagacctgcggtcagccctccatgcgcaagactaaagcagcggaagaggaggtgggcctctaggatctttgtcttctggctggaggtgcttttggaggttgggtgctgggcattcggtcgctcctctcacgcggctgccttatcgggaaggaaatttgtttgccaaataaagactgacacagaaaaaaaaaaaaa

SEQ ID NO: 138 - DNA, 1655 bp, Homo sapiens
  CDS (4)..(1230)
gacatgacgcccgaggacccagaggaaacccagccgcttctggggcctcctggcggcagcgcgccccgcggccgccgcgtcttcctcgccgccttcgccgctgccctgggcccactcagcttcggcttcgcgctcggctacagctccccggccatccctagcctgcagcgcgccgcgcccccggccccgcgcctggacgacgccgccgcctcctggttcggggtctacatctccgaaatcgcctacccagcagtccgggggttgctcggctcctgtgtgcagctaatggtcgtcgtcggcatcctcctggcctacctggcaggctgggtgctggagtggcgctggctggctgtgctgggctgcgtgcccccctccctcatgctgcttctcatgtgcttcatgcccgagaccccgcgcttcctgctgactcagcacaggcgccaggaggccatggccgccctgcggttcctgtggggctccgagcagggctgggaagacccccccatcggggctgagcagagctttcacctggccctgctgcggcagcccggcatctacaagcccttcatcatcggtgtctccctgatggccttccagcagctgtcgggggtcaacgccgtcatgttctatgcagagaccatctttgaagaggccaagttcaaggacagcagcctggcctcggtcgtcgtgggtgtcatccaggtgctgttcacagctgtggcggctctcatcatggacagagcagggcggaggctgctcctggtcttgtcaggtgtggtcatggtgttcagcacgagtgccttcggcgcctacttcaagctgacccagggtggccctggcaactcctcgcacgtggccatctcggcgcctgtctctgcacagcctgttgatgccagcgtggggctggcctggctggccgtgggcagcatgtgcctcttcatcgccggctttgcggtgggctgggggcccatcccctggctcctcatgtcagagatcttccctctgcatgtcaagggcgtggcgacaggcatctgcgtcctcaccaactggctcatggcctttctcgtgaccaaggagttcagcagcctcatggaggtcctcaggccctatggagccttctggcttgcctccgctttctgcatcttcagtgtccttttcactttgttctgtgtccctgaaactaaaggaaagactctggaacaaatcacagcccattttgaggggcgatgacagccactcactaggggatggagcaagcctgtgactccaagctgggcccaagcccagagcccctgcctgccccaggggagccagaatccagccccttggagccttggtctgcagggtccctccttcctgtcatgctccctccagcccatgacccggggctaggaggctcactgcctcctgttccagctcctgctgctgctctgaggactcaggaacaccttcgagctttgcagacctgcggtcagccctccatgcgcaagactaaagcagcggaagaggaggtgggcctctaggatctttgtcttctggctggaggtgcttttggaggttgggtgctgggcattcggtcgctcctctcacgcggctgccttatcgggaaggaaatttgtttgccaaataaagactgacacagaaaaaaaaaaaaa

SEQ ID NO: 139 - DNA, 1218 bp, Homo sapiens
  CDS (205)..(924)
gacgcgggccgagccggaagtggagtgtgctgcggcgcgagctgggccggcgggcgtggttcgagagcgcgcagagtccagactggcggcagggcccgaggggccgacccgcagcgtccctggtctctccagccctcactcggaaccgcactgacaataccctcccctcccttgggctggacccctctctacagctaggagccaatggcagaagacaaaaccaaaccgagtgagttggaccaagggaagtatgatgctgatgacaacgtgaagatcatctgcctgggagacagcgcagtgggcaaatccaaactcatggagagatttctcatggatggctttcagccacagcagctgtccacgtacgccctgaccctgtacaagcacacagccacggtagatggcaagaccatccttgtggacttttgggacacggcaggccaggagcggttccagagcatgcatgcctcctactaccacaaggcccacgcctgcatcatggtgtttgatgtacagaggaaagtcacctataggaacctgagcacctggtatacagagcttcgggagttcaggccagagatcccatgcatcgtggtggccaataaaattgatgcagacataaacgtgacccaaaaaagcttcaattttgccaagaagttctccctgcccctgtatttcgtctcggctgctgatggtaccaatgttgtgaaggtgtggttgactgcagaggtagctagcaagctcttcaatgatgcaattcgattagctgtgtcttacaaacagaactcccaggacttcatggatgagatttttcaggagctcgagaacttcagcttggagcaggaagaggaggacgtgccagaccaggaacagagcagcagcatcgagaccccatcagaggaggtggcctctccccacagctgaggggctggggctaggggtgggtggagcccttttaaaatacccttcccttcaacaactctccagctctgaatggagaaactctctaggccatcccctcttctacctcctgcaacccacccatcctattagcctcccacattctaggcccgtgatacagggatgaggtcagcaccagcaaactctggactggtggaagaattccccaccagatctccttgaagcagaagtagggatcagcatcattaacaccttccccaccccctccccgcaggcagacagtgaagagaatcagaa

SEQ ID NO: 140 - DNA, 1842 bp, Homo sapiens
  CDS (934)..(1842)
tcagccagctggactcagtttagacgatcccaattttgttgcaacatccaaagcttcataatcaggagccagtcgaacatatgccttgttctctttatcaggaaaaatcagggtggtgaccttggccacatcactgtcatagagcttcttcacagcctgtttgatctggtgcttgttggctttaacatccacgaagaacacaagcatgttgttttcttctatcttcttccggcccattgatagcatagtggccaagcttgtttctcctgggggtgctcttccgaggatatctgggctgcctccggagtcgcagtgtcttgggccgcctgaaggtgagtgacatgcggatcttcttttttgcgtgtggctgcggacacctttcaacactgccttcttggcctttaaagccttcactttggcttcggctttaggaggagcaggagcttccttcgctttcggtgccgtcttcctcaatggcctgcagccacgtctccccaggtcagtcttaaggacaacgaaactctggtcttcactgtggacatgccacactaccaggtgctccaaagccatggtgacccatcctcaggcgggcggcacccgctgaagcctcagtaccacacccacagccaggagccccagtcccgcactcggccgcatgcgcactcctgcggccctcccgccaggcgccgctgggcagccagcgaccggcggggtccttcacgttcggccgggcagcctccctcggggtccttgcgcggttgcgtagcagctgcgaggacgcggggcgagccggaagtggagtcgctgcggcgcgagctgggccggcgggcgtggttcgagagcgcgcagagtccagactggcggcagggcccgaaggggccgacccgcagcgtccctggtctctccagccctcactcggaaccgcacgagccaatggcagaagacaaaaccaaaccgagtgagttggaccaagggaagtatgatgctgatgacaacgtgaagatcatctgcctgggagacagcgcagtgggcaaatccaaactcatggagagatttctcatggatggcttgtatccttcaaggtttgaagtactccttgttcctgtgggtcttcccacgctcatgtatcagtgtcccactgcccacccctttgtaccagcagcccaggaacaggaaggaggattggacttcgatggccaggacacactctcatctcctcccacccctcacccttccatggagcttgtaccagtgtgcagtcagccacagcagctgtccacgtacgccctgaccctgtacaagcacacagccacggtagatggcaagaccatccttgtggacttttgggacacggcaggccaggagcggttccagagcatgcatgcctcctactaccacaaggcccatgcctgcatcatggtgtttgatatacagaggaaagtcacctataggaacctgagcacctggtatacagagcttcgggagttcaggccagagatcccatgcatcgtggtggccaataaaattgatgcagacataaacgtgacccaaaaaagcttcaattttgccaagaagttctccctgcccctgtatttcgtctcggctgctgatggtaccaatgttgtgaaggtgtggttgactgcagaggtagctagcaagctcttcaatgatgcaattcgattagctgtgtcttacaaacagaactcccaggacttcatggatgagatttttcaggagctcgagaacttcagcttggagcaggaagaggaggacgtgccagaccaggaacagagcagcagcatcgagaccccatcagaggaggtggcctctccccacagctga

SEQ ID NO: 141 - DNA, 545 bp, Homo sapiens
  CDS (52)..(357)
ccggaattcccgggtcgacccacgcgtccgcctctctacagctaggagccaatggcagaagacttaaccaaaccgagtgagttggaccaagggaagtatgatgctgatgacaacgtgaagatcatttgcctgggagacagcgcagtgggcaaatccaaactcatggagagatttctcatggatggctttcagccacagcagctgtccacgtacgccctgaccctgtacaagcacacagccacggtagatggcaagaccatccttgtggacttttgggacacggcaggccaggagcggttccagagcatgcatgcctcctactaccacaaggcccatgcctgcatcatgcagacataaacgtgacccaaaaaagcttcaattttgccaagaagttctccctgcccctgtatttcgtctcggctgctgatggtaccaatgttgtgaagctcttcaatgatgcaattcgattagctgtgtcttacaaacagaactcccaggacttcatggatgagatttttcaggagctcgagaacttcagcttggag

SEQ ID NO: 142 - DNA, 2510 bp, Homo sapiens
  CDS (1088)..(1606)
ccactttgtacaagaaagctgggtacgcgtaagcttgggcccctcgagggatactctagagcggccgcgggccagagggccggggccggggccgcgacccgcatcgggatcgcacccgctcccgctcccgctcgcggtcccctttgtcgcccaggtcccgccgcggctctgcgcgggagcgcagagaggccccagagcgcccgagcctggaggacacagagccgtcggattccggggacgagatgatggacccggccagcttggaggcggaggccgaccaaggcctgtgccgccagatccgccatcagtaccgggcgctcatcaactccgtccaacgtaaggcggcgcctccgggcggcgcgggcccggacgggccgctgtccccgccctgcgccgggcgcggggggagggcaccggaggcaggtgccgggcggaggcccggcgcggcgttagtagagacgcgccgggtgccagcccctcgccgcaccttaaattgttgacaaagtgctcccactttgtggctggagccgtacgaccttggcgcgggtccccgagtggcgggctggaaaagctggaggccagagccgttcgcggactcgcccgagcccagccagccagtggggagagcatgacgcggacctcgcgtgctatgattgcgccccgcagtgctcgggcgtggctcccagcctcgcagcggcagctgcagctggcagcgaacgcgagagctggcaatgcacgttctcggaccccacccggacccgcgtttttttaatctctgggtggctccgcgcaactgtggagtggccctccaggtgatggtgtgtgttgcttgcaaagcttgagaaccactcagttatggtgcactcaaaggctgcagccggagtccagccctttggtttaagaaaaccgtgaggacatactgaatgccggtgacaaattaacagaggtccttgaagaggctaacactctgtttaatgaagtgtcccgagcaagagaagcagtcctggatgcccactttcttgttttggcttcagatttgggcaaagagaaagcaaagcagctgcgctcagacctgagctcctttgacatgttaagatatgttgaaactctactcacacatatgggtgtaaatccgctagaagctgaagaactcatccgtgatgaagatagtcctgattttgaattcatagtctatgactcctggaagataacaggcagaacagcagaaaacacctttaataaaacccatacattccactttctgttgggttcaatatacggagagtgccctgtgccaaagccacgagttgatcgtccaagaaaagttcctgtgatacaagaggagagggcaatgcctgcccagttaagaagaatggaagaatctcatcaagaagcaacagagaaagaagtagaaagaatcttgggattgttgcagacatattttcgagaagatcctgataccccaatgtccttctttgactttgtggttgatcctcattctttcccccgtacagtggaaaacatctttcatgtttccttcattatacgggatggttttgcaagaataagacttgaccaagaccgactgccagtaataggtaaatgatactatgtttggaaaaattagttttagagaaaatatatttgttagtagaatttaagtattttactaaatgtaaatgaattttcaatgtagattaacttttacaatattgtatcttgctcaactacctgaagatactgaaaacatggccagcgtctaaaattttgatggattcatctatatcattgattcaacatctgctgtaaatattaacaaagaaatgatataatttccctcagatcttaatttagaaagttggtgattgcagtcatttttgtagtatccctctttctaatcacgttttgtcagatgccggcaccttcttttctctttgaggttctatgaatctttcattcttacctgaataatttcacactctccattactcatgtcctcctaaggtctcctgtggagagtgaatatttccatcgcacttacttgctactttcaatgttctcaatgtcctattggactcactagggcttagctctgtggttgacacatagatatgcagattttcaaatgtctggaatgtgttactctactacatgttttttgaaatggaaacagatggaatgactggctactgtaataatactacagcagctccataatgcatgaaatcctaaaaagtatgtaatattataagtatcttttcaatacaggtttcattgcgaataatcatccagtttccgttaggaatccctgttccgatttaataaccctttggtaaatttgaaaaatttgtctttccaacagagcctgttaggtattaatggaagaaatgaggggtttggacattacacacaagtttggaatccagggattatagctttgaggtttcgtgcctgggaggttaactctgcctggtgccctgccaagtcttgctctgcttcattgcagatta

SEQ ID NO: 143 - DNA, 2310 bp, Homo sapiens
  CDS (199)..(1380)
atttggccctcgaggccaagaattcggcacgagcgcgagttgcggagcctgcatctctgaagctgcctcggtgaagagccacagcattattttttttctctttgggagagtagctgtctgggatttgagatcctatcttccctgcaaattaccaggttgcatcttcactgataggaatacatttcttcaccaaaggacatggatgaaaatgaaagcaaccagtctctgatgacaagcagccaatatcctaaagaagcagtaagaaaacgtcaaaattcagcacggaattccggagcaagtgattcttctaggttttctaggaaaagcttcaaactggattatagactagaagaagatgtaactaaatccaagaaaggaaaagatgggagatttgtgaatccgtggccaacatggaaaaacccctctattccaaatgttctcagatggctgataatggagaaagatcacagcagtgttccaagttctaaagaggaactagacaaagaactcccagtgcttaagccatattttatcactaaccctgaagaagctggagtgagggaagctggcttaagagtcacatggctgggacatgccacggtaatggtggaaatggatgagctcatatttctcacggatcccatctttagctctcgtgcttcaccatcgcagtacatgggtccaaagcgatttcgtcgttccccgtgcacaataagtgaactccctccaatagatgcggtccttatcagtcacaaccactatgaccatctggactacaattctgtcattgctttgaatgagcgatttggtaatgagttgagatggtttgtgcctttgggtctccttgactggatgcaaaaatgtggctgtgagaatgtgattgagttggactggtgggaggagaattgtgtccccggacatgataaggtcacttttgtctttacaccttcccagcactggtgtaaaaggactctaatggatgacaacaaggtgctatggggcagctggtctgtcttggggccttggaatcgattttttttcgcaggagatactggttattgccctgcttttgaagagataggaaaaagatttggaccttttgaccttgcagctattcccatcggagcttatgaaccgaggtggtttatgaaataccagcatgtagacccagaagaagctgtaaggattcacactgatgtccaaacaaagaaatctatggcaattcactggggaacttttgccttagcaaatgagcattacttagagcctccagtgaagctgaatgaagctctagagagatacggacttaacgctgaagatttttttgtcttgaagcatggagaatcaagatacctaaataataatgatgaaaacttttaataaatgtgagcacaggcacttttaatgaaaaaggcatcatctaagtttaaaaacaaatgaaaagacttagaaattcatgaatattgtgattattttacatttggaaacaacttctgcaagtttatgttttatgttttgtgtaataacttgcttcctagtatgatcagctcatgtacactatgagagggttcaggggtgggtcatttaaataatgaattggctaatgtggattttaaatttcatatcatgatataagcactgcaatggaaatgtttttactaaaacattatatttttgtggtactagaatttcctgaggtgaaaaaccgatattgaagattcatttttcttttttccattcttcaggaccttcggcaaggtgagtcaaggctctctacctacctagatgtttttcagaggcctacaaatacaagtatctttcttatatgcacattctaataaatgatgaaattcagtccaacatgcttattataaacatagcaattcttgctctatcaaattagcttatatgccaaatattaaatatggtttatttaggtaagcataaaaacataggggctatcatttttaaagacttgattttctctattgtggtaaaatatataaatacatatttgccattttaaacatttaccattttaaccatttttaagtgtacagttctttcgcattaatgcacccatgaccaccattcacttaaatttttaaaagaacagtatattctttttttcctagagccttcagatgagagggaacagtatattctattgcacgtctacaattcccaaaagacctcttactttgggaggccaaggtgggtgggtcacttgaacccaggagtttgacatcaacctgggcaacatggtgacctcccgtctttctcggaatgtatataaaaataaaaaaaaaa

SEQ ID NO: 144 - DNA, 1884 bp, Homo sapiens
  CDS (373)..(1533)
atgcgtacgttagcttggatcctctagagcggccgggtgtgagtgtgtgggagtgagagtgtgtgggagtggggtgagggagaagctgacgggacgcgaggcggtgagaaactgggcgagtgtgcgaggacgcccggccagcctgcgggagccgcagtcggcggaggagaaaggaggcggctcccggtatcccgaccccctccccctcctcttcttcccccacttccagccgcccggcggcccgcgcttcctcgaaggccccagcccggctcagtcggccgagagcgagggaggagccccccgacccaggtgagcggtagacgttacatccaagaggaaataatccaggcaaggaagcacaagctgatcaagatgtgtagttctgtggctgccaagttgtggtttttgacagatcgtcgcatcagggaagactatcctcaaaaagagattttacgagcattgaaggccaaatgttgtgaggaggaactggactttagggctgtggtgatggatgaggtggtgctgacaatcgagcaaggaaacctgggtctgcggatcaatggagagctaatcactgcctacccacaagtggtggtagtcagagtaccaaccccttgggtgcaaagtgatagtgacatcactgttttgcgccatctagagaagatgggatgtcggttaatgaaccgacctcaagccatcctgaactgcgttaataagttctggacatttcaagagttggctggccatggtgttcctctgccggatactttctcttatggtggccacgaaaattttgctaaaatgattgatgaggctgaagttctggagttcccaatggtagtaaagaatacgcggggtcacagaggtaaagctgttttcttggctcgagataagcaccatttggctgatctaagccatcttattcgccatgaagcgccatacctgttccagaagtatgttaaagagtctcatggacgggatgtacgtgtcattgtcgtgggaggccgtgtggttggcaccatgttacgttgttcaacagatgggagaatgcaaagcaactgctcattaggtggtgtggggatgatgtgctcattgagtgaacaagggaagcagctagctatccaggtgtctaatatcctggggatggatgtgtgtggcattgacctgctgatgaaagatgacggctccttctgcgtctgtgaggccaatgcaaatgtaggtttcatcgcctttgataaggcttgtaatctagatgtagctggtatcatagcagactatgccgcctcccttctaccctctggccggctcacccggcgtatgtccctgctctccgtggtgtccactgccagtgagactagtgagccggagctgggtcccccagccagcactgctgttgacaacatgagtgcaagttccagctctgttgacagcgaccctgaaagcacggagcgagagctgctcaccaagctcccagggggcctgttcaacatgaaccagctgctagccaatgaaatcaaactactggtggactgactccactggtaattaaccaacaaaacccttgtaaaactttctttcttcttttctatttttaaaaccaacttgcaatgctgttcatggaggatgctcaggaagatgagagaaaattagtaggattagttggagagagtgggagatagatgagacctctgctagtaagatgttactttcatttacaaatcctacaaatagagaggcagaataggtggggtatagaaaaatgtcaggctctcatagttacccttttaaattgctaaaaaatgtgtatgctcataggccatgaggaacaaatactttttttttttcatggtcccttgcttttgtttttgtacaaaaaaaaaaaaa

SEQ ID NO: 145 - DNA, 496 bp, Homo sapiens
  CDS (54)..(179)
atttggccctcgaggccaagaattcggcacgagggattcattccggcaccaccatgtcgaaggtttcctttaagatcacgctgacgtcggacccacggctgccgtacaaagtactcagtgttcctgaaagtacacctttcacagcagtcttaaagtttgcagcagaagaaatggaataggaataaatcctgcacagactgctggaaatgtttttctaaaacatggttcagaactgcggattattcctagagatcgtgttggaagttgttaatatctgctacttggaacatacgattgcctttcagaataaatattggtattttttgttgttgtaaaattgaaatcaggcatttaacatactatgaaaacaccaggagtcaatgattaatgaaaggtgactcatctgtccctatttgatgtccatattcttcttataaaagggattcctatataattaagggttctaatgggcccaaaaaaaaaatctttttgggct

SEQ ID NO: 146 - DNA, 1519 bp, Homo sapiens
  CDS (84)..(971)
aaacagttgccttttcctctcacagaaggaagatttcattttgtttgagacgagaaaccaaaccacacaccaaagagaggggtatgatggctaagaagcccccaaaaccagcccctcgcaggatcttccaggaaaggttaaagattactgctctacctttgtactttgaaggttttttattaatcaagcggtcaggataccgggagtatgagcattactggacagagttgagaggaactactcttttcttttataccgacaaaaagagtataatatatgttgacaaattagacatagtagacctcacatgccttactgagcagaattcaactgaaaagaactgtgcgaaattcacccttgttttgccgaaagaggaagtacaactgaagacagagaacacagaaagtggggaagaatggagaggcttcattcttacggtaacagagctgtcagttccccaaaacgtgtcactcctacctgggcaagtaattaaactgcatgaagtcctagagagagaaaaaaaaaggaggattgagacagagcagagtacgtccgtggaaaaagagaaggaaccaactgaagattatgtggatgtactgaaccctatgccagcatgtttttatacagtgtcccggaaagaggcaactgagatgctccagaagaacccttctttgggaaatatgatcctgaggcctggtagtgacagtagaaactactccatcactattcggcaggagatagacattccaagaatcaagcactacaaagtgatgagcgtaggacaaaactacactattgaactggaaaaacctgtaacactcccaaaccttttcagtgtcattgattattttgtgaaggagactcgaggaaatttaagaccatttatatgttcaactgatgaaaacactggtcaagaacccagtatggaagggagaagtgaaaagttgaagaaaaatccacacattgcatgaaatacaatgtgaaagctcctttgtatatcttggtaatttatattttcaaaacgaagttcttacttttaaagagaattacctatattctcctgatactgattaccaagtcattcacctgaacaccagaattagaattaaacattgtaccatacaatttcattatcttatcagaatgaaaccaattcacagggaaactagagactacggctgtggtggtaacctgcagatatacacattcccatgcactgacataagttgaaaacacatagtactttctagatggaatttttttctttaggcctcaatgaaatacatttcccctatataattccaacagcagtttctctagttctaaattttaccaattcccaaaaaacctaagttttgctgaaatctgatttgaccaatttatcaaatatgtcattttaattacctagctggaagttagagacatgaaatgtactagaggagcccttttccaatggaaatattatataccacattttttgttaatggaaataaatgtctccattcccaaaaaaaaaaaa

SEQ ID NO: 147 - DNA, 4958 bp, Homo sapiens
  CDS (1)..(2304)
atggcccgcgggtcgctgggggtcagcccccgggcccccctcgctgcgccccgctttagccagtgtggaatgtggcgtgtctgcgcgttccaaacccgctctcgcctggaatgttgcgtgtgcctgcgttccgagcccgttggttacaccggaagtgatgggcggggacatcgcccacactccccggctgttgccttgatggtccagagcagggtctggcagtggagagtgcccctggtgaccaagaatgtcctacgtttgggcacaggggtcaggggaagaccgtgcacaaggttcggagagattaagtcacctgctgccgccatcaacacgttgcagttcgagtacgcactgtgtttaggccgagttcagcggcctggtcacgacttctgtgtgccggctgagcggggtgtcactgaggatgtcagaggatgctttaggcctgaaggacaggacatgctggcgctgctgctggtgggccgcctgtcctgcccgcagcccggactgtcagcccccgtgactgtcagcccccgtgactgtcctactattccctggtggcggggaacaggtctgcttgatttgttcactgctgtgcccccggcactttcccccgtgcctggctgggctgaggagcaggagcggcttcgcttggagcaggagcgagagcaggaacagaagaaggccaatagcctggccaggctggcacatacccttcctgtggaggaaccccgcatggaggcgccacccctgcctctgtctccaccggctcccccgccggcacccccaccaccacttgccacccctgccccactgactgtcatccctatccctgtggtgaccaactcccctcagcctctacccccacccccacccttgcccgcggcagcccagcctctgcccctggcgcctcgtcagccggccctggttggcgcccccggactcagcattaaggagcctgcccccctgcccagcaggccgcaggtgcccacccctgctcccctactgccggactcgaaggccaccattccacccaatggcagccccaagcctttgcagcccctccccacgcctgtcctgaccatagcgccacaccctggagtccagcctcagctggccccccagcagccgcccccacccacgctggggaccctgaagttggcaccagctgaagaagtcaaatccagtgaacagaagaagaggcccggggggatcggaaccagagaagtccacaacaaattggagaagaacaggagggcccatctgaaagagtgctttgagaccctgaagcggaacatccccaacgtggatgacaagaagacgtccaatctgagcgtgctgcggacggcgctgcggtacatccagtccctgaagaggaaggagaaggaatatgagcatgaaatggagcggctggcacgtgagaagattgccacgcagcagcggctggcagagctcaagcacgagctgagccagtggatggacgtactggagattgaccgcgtgctgcggcagacgggccagcccgaggatgaccaggcctccacctccaccgcctctgagggtgaggacaacatagacgaggatatggaggaggaccgggcgggcctgggcccacctaagctgagccatcgtccccagccggagctgctgaagtccaccctgccaccccccagcaccacccctgcgcctctgcctccacacccacaccctcacccccactccgtggccctacctcctgcccacctccccgtgcagcagcagcagccacagcagaagacccctctgccagcccctcctcccccaccggctgcccctgcccagacactggtgccagctccagcccatctggtggcgacggctgggggtggctccacggtcatcgcccacacagccaccactcacgcttcagtcatccagactgtgaaccacgttctgcaggggccaggcggcaagcacatcgcccacatcgccccctcggcccccagccctgcggtgcaactggcgcctgccacaccccccattgggcacatcactgtgcaccctgccaccctcaaccatgtggcccacctgggctcccagctgcccttgtacccgcagcccgtggcagtgagccacatcgcccacaccctctcgcaccagcaagtcaacggcacggccggcctggggcccccggctactgtcatggcaaagccggccgtgggggctcaggtggtgcaccacccccagctggtgggccagaccgtgctcaaccctgtgaccatggtcaccatgccctccttcccagtcagcacactcaagctggcttgaggacgaggccactcagaggcccccagtggggacagggagggggacctgtcccccactctctcacccaccagctccacacattccagccaggcccaggccagcccccccacccacccccaggcctcctaggggaagggggtgcaaagactctgagccaagggagggaagggccaccctgctgcgctaggacttggtaagatgactctgagaaaatgcgagactctgatggaatgtgccacctgtccggcccagtgccagctccagtgccgctcctgcttcccctccctaccctcggaaatcagtgcgatgtggacgtcacgctccctgacttctcccccgccctgccccgccttcgtgtgctgctgctgctattgctgtctggtgaggtggcccaggcccccggctttcctccggagcctcatgttctcttcccaggcctttggaggggaaatggggaaagcagaactgaagccacttggcccagaaagctgcggattggggtgataaggggccttgctctgagcacaggtgacagatcataggaagtggctggtctggagtcccacccggacaggtggggcctcagcctggggctctctgacccggttgcagtcactgtgattcgttaccgtagatactacttaaaatgattctctaccaacaataaaccaaacccagccactgccaagcttcctgtgccctcaccccaatccctgccactgggctctggacctcaggagggcaggctgaggtggggaaggagggacttggctgtccttccccttccccgtcccctgcagcctgggtctggatgggaggagagccactgggcccctgtccccagtccccagtccccagccctgggcttggctcttggcttccagaaggcagcaaagaggggcgctgtcctgcgttcagcccctgatctctgacctctgctgagtgctgggcactgctccaagggacaggtgggcctggcggcctgtgggtttgggtgcctcctgcagtttgggagacatggaccagcatctggtcttgtttccaggagcatagaagccacatcgttgagacatcaggaaggtaaaaacccagcggcttagccaagccctaagcctgtccccagaccaaccctgggacctatacagaacagagggccagagctagggctgctgcttctgctccagcccctttgcctctgtcctcccatcccctcaacaccctgcttctcccggggacgcttttgagtgggccctgcccggggagctgcagagcagcagcacctttctctgagaagaggtccttggttgggtcaaggacagggctgagcgtggaagggggaggagtcaggggctctgtgttaggatgcggctttctctgcctctgggcagcctgctttggcctttccttgtatgtgggtgtttattacaagtgggccccccccccctccccacctggacacacacacaccagtggccttcagtgtagcgggaggaagccggtgtccctggatgtgaagctcacactgatgggctggggcaggggctgggcggcgagggggcccggggaggggacagagctgaggatttcctggagtgccctgcaggccaagaggaggtcagcaaaggtcttgaatagattttctctggaaataaagaatccttagatcctaaaaatcccttcctgttccctcctggtcctggacacctcccaggggactgttccttatttctctctcctggtgtgggtaaagggacagttacaaaccaggtcaccatcctcagaggctgagcctgtacccaccccagcacagccacctgccagacccgtggctctgggagagagcccttttgctattccattgtgacagcgatgcaggcctgaccggacggggcagttagagcagcctcgtggagctcgcccctcccctcagcctgcccgcctctccctgcatcctgagccagtgcccccgggcctgcacagatacctcatcatccacccgctgcccctccccgtccctgtccccagcatcgggggcctgcaaatctagtgccgaaatctagtgccgaatgactatgtccagattggtgacgatgggtgttgctgtttttcttgtgtttgtgaacgcatgtgatgctgtggaagtgggcagtcaccacccagcccttccttgggcgtctcccccagagtgctgtcgggaccacatctgtcctcacctgtgggagcgcctggccctccctccctagcccttccagcctgggacacacacacacacacacacacacacacacacacacacgcacgcacacgcacacatcttacctctcatgcgtgttttaccttttgatgttcagagtggctcactggctgggagtccttacctcggggaggagggggaggttggttccttggggggccaaagaaggcagggaatgcctggagggtaactggggggccaccatgaccccttctctctccagaaacagctgcttctccccccatcccagggtcccacccccaacccccagaggtggcccttgtttacagtgaggactcggccactgtgtctctgtttcctgaaatataaactgtagcgaccccagactgtagagatttttatgtgtttggatacatctgctgtgtggaaaaaaaaaaaa

SEQ ID NO: 148 - DNA, 1034 bp, Homo sapiens
  CDS (294)..(503)
attgacgcctgccggtaccggtccggaattcccgggtcgacccacgcgtccgaagggggaagccaggggcccatttgggggcccagcccccaatcccacccagcagaggaagccaaggtcggggcagctgtgattgctccctggtcctggagaggaaactggccatctgctttatctgaagattttcagctgatgaagaactaggaggctcaaacactatcttacctgagtccaggacaagtgacttggagagtgtgctcttctgtggcaggatcaggtctgtctagggcaggatggcccaggatctcagcgagaaggacctgttgaagatggaggtggagcagctgaagaaagaagtgaaaaacacaagaattccgatttccaaagcgggaaaggaaatcaaggagtacgtggaggcccaagcaggaaacgatccttttctcaaaggcatccctgaggacaagaatcccttcaaggagaaaggtggctgtctgataagctgatggcatggagccctgccctgagtgtctgtccctcttcagccaagcccaagtctcctagacccccagggagccagtgaactgtcaccttctcttcatcacagaatgagtaaagatccctgaacaaatgcattgtgaacccattccccactcccaccttcaactcttttctcccattatttcctccacctgctgggtctctgctgaccttgctgggaacactctgaggacagtgtggctggccgagcggttggccccatgggtggtggggtgtgagaagcctgcaataccccaagaccccagagggcagtccttaggaagcacttacaccacctgggaacccctccgtcttttccctctactctcatcctaggaataaagcatttccacgccagagtagtttgggctgggggccagggttgggtggtcctgtccctccatatcatgtcctaccctatggtcctgttcctagtcatttagatcaccccagatggcctgatgacaacaagagtttgtgaagttaaaaaaaaaaaa

SEQ ID NO: 149 - DNA, 4144 bp, Homo sapiens
  CDS (373)..(1629)
tcaagctcgccccgcgcagcccgagccgggctgggcgctgtcctcgggggcctggggaaccgcgcggtttggagatcggaggcacctggaacccgtggcaagcgccgagccgggagacagcccgaggaaccacgggttctggagctaggagccggaagctgggagtccggaggagagcggagcccggagcccggagcccggggcggcgcgtctgggtctggcgcttcccgactggacggcgcgcccgctggtcttcgccacgcgccctcccctgggctcgcgttcatcggtccccgcctgagacgcgcccactcctgcccggacttccagccccggaggcgccggacagagccgcggactccagcgcccaccatgcgcctcaacagctccgcgccgggaaccccgggcacgccggccgccgaccccttccagcgggcgcaggccggactggaggaggcgctgctggccccgggcttcggcaacgcttcgggcaacgcgtcggagcgcgtcctggcggcacccagcagcgagctggacgtgaacaccgacatctactccaaagtgctggtgaccgccgtgtacctggcgctcttcgtggtgggcacggtgggcaacacggtgacggcgttcacgctggcgcggaagaagtcgctgcagagcctgcagagcacggtgcattaccacctgggcagcctggcgctgtccgacctgctcaccctgctgctggccatgcccgtggagctgtacaacttcatctgggtgcaccacccctgggccttcggcgacgccggctgccgcggctactacttcctgcgcgacgcctgcacctacgccacggccctcaacgtggccagcctgagtgtggagcgctacctggccatctgccaccccttcaaggccaagaccctcatgtcccgaagccgcaccaagaagttcatcagcgccatctggctcgcctcggccctgctgacggtgcctatgctgttcaccatgggcgagcagaaccgcagcgccgacggccagcacgccggcggcctggtgtgcacccccaccatccacactgccaccgtcaaggtcgtcatacaggtcaacaccttcatgtccttcatattccccatggtggtcatctcggtcctgaacaccatcatcgccaacaagctgaccgtcatggtacgccaggcggccgagcagggccaagtgtgcacggtcgggggcgagcacagcacattcagcatggccatcgagcctggcagggtccaggccctgcggcacggcgtgcgcgtcctacgtgcagtggtcatcgcctttgtggtctgctggctgccctaccacgtgcggcgcctcatgttctgctacatctcggatgagcagtggactccgttcctctatgacttctaccactacttctacatggtgaccaacgcactcttctacgtcagctccaccatcaaccccatcctgtacaacctcgtctctgccaacttccgccacatcttcctggccacactggcctgcctctgcccggtgtggcggcgcaggaggaagaggccagccttctcgaggaaggccgacagcgtgtccagcaaccacaccctctccagcaatgccacccgcgagacgctgtactaggctgtgcgccccggaacgtgtccaggaggagcctggccatgggtccttgcccccgacagacagagcagcccccacccgggagccttgatgggggtcaggcagaggccagcctgcactggagtctgaggcctgggacccccccctcccaccccctaacccatgtttctcattagtgtctcccgggcctgtccccaactcctccccacccctcccccatctcctctttgaaagccagaacaagagagcgctcctctcccagataggaaaagggcctctaacaaggagaaattagtgtgcggcaaaaggcagttttctttgttctcagactaatggatggttccagagaaggaaatgaaatgtgctgggtggggccgggcctccggcggcccggctgctgttcccatgtccacatctctgaggcctgcaccccctctgtctagctcggggagtccagccccagtcccgcaggctccgtggctttgggcctcacgtgcagaccctgccatgcagacccatgcccccctcccccaggcagctccaagaaagctccctgactcgccccttcaggcctggcaagctgggggcccatcgccgtggggagtccctcccaccaccctcgccgcaggcagctgcagcccccagaggggaccacaagcccaaaaaggacaaaaatgggctggcctggaatggcccagaccccagcctcccctcctccctcccatcctcacccaggccaaggcccaggggctctgccaggacaccacatgggagggggctcaggcctcagcctcaagatcttcagctgtggcctctcgggctcggcagaagggacgccggatcaggggcctggtctccagcacctgcccgagtggccgtggccaggatggggtgcgcattccgtgtgctttgcttgtagctgtgcaggctgaggtctggagccaggcccagagctggcttcagggtggggccttgagaaggggaatgtgggacaggggcgatggtgcctggtctctgagtaagatgccaggtcccaggaactcaggcttcaggtgagaaggagcggtgtgtccaggcaccgctggccggcagccctgggctgaggcacagactcatttgtcaccttctggcggcggcagccctggccccggcctccaagcagttgaaaaagctggcgcctccttggtctctaggatccaggctccacagagcacatgactagccaggcccctggcttaagaaggtcgcctaagcctaagagaagacagtcccaggagaagctggccgggaccagccaggagctgggagccacaggaagcaaaagtcagccttttcttcaagggatttccctgtctcagagcagcctttgccccagggaaatgggctctgggctggctgcctgcaccggccatgtcgacccaggacccggacacctggtcttgggctgtgttcagccactttgccttctctggactcagtttccccgtctgagaaatgagagtcgaatgctacagtatctgcagtcgcttggatctggctgttgagttgacgggttccttgaaccccacaaaatccctctccaaccacaggacccttcggctcaccaagaacggggcccaggggagtcaggcctattcgctgcacttcctgccaaactttgcccccacaagcctggtcatcagccaggcagccctcccagtgcccaagggccaccaaccccagggaaacagggccagcacagaggggccttcctcccccacagagctcccatgacatagtctgctctgggcggaagagctttgctgccagccagggatgtccagaggtcggtgcagcccctatccctgctcaggagtgggctcagagtctagcaaatgctaaggcccctcaggctgggctctgaacgaggacctggactcagagccagacagggcagcctcagacccttctctggggctcctggaccttgggccataatttctgagcctcggtttccccatctaaggaacagatgtggtcgttccgccctctcagctggatgagactgtcctggaggatccaccccggaacagacagaatggtgtctctcaggatggtgctctgagagagggcagagtggatgccccactgccctagaccctcggtagacgtggggtctctggggcggggtctgtggctgtgactgaagtcggctttcccgttgatgtcttgatgctcctatctgtgcacttaccgtaggtagggacacgtgtccatgcaccacagacacacccacgacacctgatctcgtatcactagcttgcggccaggtcatgatgtggccccggaagctggccctgcgtgccatgagtgcgtcggtcatggagtccggagcccctgagccggcccctggtgacgcacagccctcacagctcaaacgcccacccccactcccaccatctgcaggtggtgaaaacaaaccccgtgtatctctcaataaaggtggccgaagggcctcgatgtggaaaaaaaaaaaaaa

SEQ ID NO: 150 - DNA, 713 bp, Homo sapiens
  CDS (73)..(546)
atttggccctcgaggccaagaattcggcacgagcccactactcggggctccgctcggcttcttcgcgccgagatgcctaagaaggctggtgcgacgaccaagggtaaaagccagagcaaggaaccagagagaccacttcctcccttaggtcctgtggcagttgatcctaaaggatgcgtcaccatagccatccatgcaaaacctggctccaaacaaaatgctgtaacagatttgacagcagaggctgtaaatgtagctattgcagcacctccatcagagggagaggctaatgctgagctctgtcggtatctttccaaggtcctagaactcaggaagagtgatgtggttttggataagggtctctcactttgtcacccaggctggagcacagcggcacaacctcgggtcactgcagccttgacttccctggctcaaacaatcctcccacctcagcctcccaagttgctggaactacaggtgcatgccacccacacccggctaattttcgtattttttgaagagacgggatctcgccatgttgcctaggctggaagtcttgggcttcggtgatcctcctgccttggcttcccaaagtgctgggattacaggcatgagccactgtgcctggcccgaattatttttcttactttattaacttccaataaaaggtttgggacaaaaagatgtgacaatggaagctattgtgataacgg

SEQ ID NO: 151 - DNA, 1053 bp, Homo sapiens
  CDS (573)..(728)
ttactgagccgtacgcctgcaggatccggtccggaattcccgggtcgacccacgcgtccggttttagtactgttttaggtattggggatataccaaggaataaaacaagattcctggagggagaggggaacggacagcaaacaatagacacaatacgatcgtgaggtatatagttaatgttggtgatgagtgctcctcaaaggaaacaactaaaaccagacaagggaagtcggggtgtcagggagaatggtttgtagtattgatgacaatggttaaggaaggcctgagttctgcaaagacctcaaggatatgagggactagagtgccctctgctgtggaagagcctgcgcaaagatcctgaggtgggaggggtcagggagccaactcattttacggtaagtggaggtgggatccaggggaggattctgagcagaggagggacgtggcccaatttgggctttgaaaggatcctgcttgtctgtgtgccagcatcctggtggtggttgggggagtctgcatcaatcctgggtgctgttacctgaaaaaatagcaggtgttagacgaaagaacagatgtctggcccattgtctccagtctgttcctgtccacagcttccctttatgctgagcccctgccacatgcatcatcatcctggccatgtggcattgtcacagaccgtctctcctgctagcctcctaactcagggcctgggtcttccccagcattaagtaaatcagtctcaggcagacagccctttataggtgtttgggccaggtgcggtggctcacgcctgtaatcccagctctttgtggggccgaggtctttgagctcaggagttcaagaccagcctgggcagcatgacaaaaccctgtctctaccaaaaatacaaaaattagccacgcatggtggcacacacctgtggtcccagctactcgggaggctgaggtgggaggatcgctggagcctgggaagttgaggctgcagtgagccgtgatcatgccactgcattccagcctgtgtgatggagagagaccctgtctcaaaaaaaaaaaa

SEQ ID NO: 152 - DNA, 1201 bp, Homo sapiens
  CDS (187)..(756)
cttagggagacccaagctggctagcgtttaaacttaagcttggtaccgagctcggatccactagtccagtgtggtggaattcccgggctccaggggttcccacccccggcctgcggtgggcagcagctcaggttctccaaatcattgcgtagttccgaataccctcggccacacctggccttctccatgctcggaataacttcctgcagcgaccaacaggctaaagagggggaaggtctggagggatccagcaccggctcctcctccggcaaccacggtgggagcggcggaggaaatggacataaacccgggtgtgaaaagccagggaatgaagcccgcgggagcggggaatctgggattcagaactctgagacgtctcctgggatgtttaactttgacactttctggaagaattttaaatccaagctgggtttcatcaactgggatgccataaacaagaaccaggtcccgccccccagcacccgagccctcctctacttcagccgactctgggaggatttcaaacagaacactcctttcctcaactggaaagcaattattgagggtgcggacgcgtcatcactgcagaaacgtgcaggcagagccgatcagaactacaattacaaccagcatgcgtatcccactgcctatggtgggaagtactcagtcaagacccctgcaaaggggggagtctcaccttcttcctcggcttcccgggtgcaacctggcctgctgcagtgggtgaagttttggtaggtgagtgtcagagtgagccgacccaggccacatcctggcagtggaggcacagtcacccggggcagggccaggatcttggtatatcctcagatctcagtgggcagcgacatgaagtcaggcaatttcttgcaaccaccaccgaggccccgaaaagcactggtcgtcagggagctcctccccttggcccccagcctgtgccagccctggcccggctgccacacctctgtttcctaggctggggacccagcttgtctctccttgtttcttcccactgcactgtggtgcttcagtggccaccagcctcgtcacatacaccagcatctttctgtacctcctccccttggtgacctgaagtcactgtgacagttctccaggaaggaggagcttcctacttttgagtttctctgtggaaataaaacatgaatcttgtttccctaaaaaaaaa

SEQ ID NO: 153 - DNA, 1412 bp, Homo sapiens
  CDS (1)..(1161)
atgactcgccagtgccaggcctcaaaccaacagctcgggccccagcccctggccacaacgccacctgacctgttcctgggttttcagcagctgtttgggacctttgctagctggggccgggagccccactgcgggggccccgatttcccccaacccatccagaccgttgaagatgcccttaggaagccttcaggacttcagctgattaattacattcacacttatcttccacttcctgcaaagtaccaaatacacagaacctttcgacctgcacctccaggaggtgtggcaggcgtgcttgtgggacacccgtttgacacggtcaaggtacggcttcaggtccagagcgtggagaagcctcagtaccgcgggacgttgcactgcttcaagtccatcatcaagcaagagagcgtgctgggcctgtacaagggcctgggctcgccgctcatggggctcaccttcatcaacgcgctggtgttcggggtgcagggcaacaccctccgggccctgggccacgactcgcccctcaaccagttcctggcaggtgcggcggcgggcgccatccagtgcgtcatctgctgccccatggagctggccaagacgcggctgcagctgcaggacgcgggcccagcgcgcacctacaagggctcgctggactgcctcgcgcagatctacgggcacgagggtctgcgtggcgtcaaccggggcatggtgtccacgttgctgcgtgagacgcccagcttcggcgtctacttcctcacctatgacgctctcacgcgggcgctgggctgcgagccgggcgaccgcctgctggtgcccaagctgctgttggcgggcggtacgtcaggcatcgtgtcctggctctctacctatcctgtggacgtggtcaagtcgcggctgcaggcggacggactgcggggcgccccgcgctaccgcggcatcctggactgcgtgcaccagagctaccgcgccgagggctggcgcgtcttcacacgggggctggcgtccacgctgctgcgcgccttccccgtcaacgctgccaccttcgccaccgtcacggtggtgctcacctacgcgcgcggcgaggaggccgggcccgagggcgaggctgtgcccgccgcccctgcggggcctgccctggcgcagccctccagcctgtgacgctcaccccgccctccttccccagggctccttctcagaaacctgggacataaattggcccctgagtcgattgccctgcttcctgctgggatgctgcgagctgtggagtctatcagacgtgggctgaattttgctgatcagctgggtagttttggccgagaactgcacttgcctcagtgttctcatctatgaaataaggaccctcatgcccacactgtagagtcacgaagctcagagattattcccagcag

SEQ ID NO: 154 - DNA, 1977 bp, Homo sapiens
  CDS (241)..(1977)
cgcacgttagcttggatcctctagagcggccgcgtgactgaggcgagatcttccaccctcctgctccagggcctctaggtggcctccagagtgggctccacagcttgaaggcggcgtttttccgcgggtggtcgcagcgtccgcagagtcggagaaagctgcgtcagagactgcaacagtcagcacacattcctgtctgatcaggctccctccctcaagtcctctgcgatagctctggcgatgcttcaggactggtgcaggaggatgggtgtgaacgcagagcgctctctgctcatcctggatatccctgacgactgcgaggaacatgagttccaggaggccgtgcgggctgccctgtcgcccctgggcaggtaccgagtgctcatcaaggtcttcagaaaggagctcggggccagggcagccttggtggaattcgctgagggtttaaaccaaagcttgattccccgccaaatagcaggcaaagggggaccctggaaagtgatctccctgccccaggcccttgatgctgagtttcaggatatacccagtttccctgcacagccccaggggcaagcagtggccagaggtgcaggtgaagcaggagctgcaggtgaggcaggatctgtaggtgaggcaggaggtgtgaatgaggaaagatctgcaggtgaagatgaggcaggaggtataggtgaggcaggaggtgtaggtgaggcaggagcagcaggtgaggcaggagcagcaggtgaggcaggagcagcaggtgaggcaggaggtgcaggtgaggcaggaggtgcaggtgaggcaggaggtgcaggtgaggaaggaggtacaggtgaggaaggaggtgcaggtgaggcaggaggcgcaggtgaggaaggaggtgaagatgaggcaggagctgcaggtgaggcagtaggtgcaggtgtggtggaggcctggacccagtcatggcgccagaccctgcggcctctggtgaaaactatggcctaccgggaactgagacccttttccgggagggagcagccaggctgcgtggaagagtcctttgagagctggttggaggacgccaaggatatgctgcagctgtggtgccacgcgtcggaaagggagagaaggaggcggctgctggacagcttggatggcctggccctggatatcgtgagcggcctcctggaggaagatccagacttctctgcgcaggactgcctgacggcgctggggcaggtgtttaggagccgggatacatggatgacctcgcggatgaagttcctgacctgcacgcaggggccccaggaggggctgtttgccttcgtggtgcgcctggaaggcctgctgcagaaggccgtggagaagggggcggtccacccagccatggccaaccacctgcgactgcggcaggtgctgtctcgggcccgccccagcgaggcactccaggataccctgaggaggatgcagctggagaggaggccacctgacttcctgaggctgctgcggctcatccgggacatggaggcgtgggcagcctccctagcaaggagccagcagggtgtggcctgggcagcggccccagtggagagtgaagacccagctgctgcccaggcctccccggcccagggggacgccagcgaggctgatcccggagcagaagatgctgatgaggctgcttccaccaccaaagaggccgccagggttgcccctgccactggggaagatgaaaatgcccctgcaggccttgaaggcctaggtcagggaaggtcccccgacgcccctgggggcctcccagccaggatgggcagtgcagtcgacatggccccaggaggtcccagctgggagccagagggccttgtccaggttggaggccaggaggctgaggagcctccccaggaggggctcaagcccatcttagaggagtcagaaaacgaggatgaggatggggctggggaggcgggcaagcccaagtcccccccgggcaaatag

SEQ ID NO: 155 - DNA, 2545 bp, Homo sapiens
  CDS (365)..(1645)
aggacgagaacattctgggttggacgattctcggaatactgcccttcttgcttggaaaatgatcagagatggttgtgtaatgaaaattacaaggtcgttgaacaaggttagtagtgtcttgcctttttattctgtcatctcaaacttcataaacagtcatacgttctttgaaacgtagatttaatgtgtgcagtcatttataaatcaatgacatttctcttttttgtcataaaactgtatactgaagaaattaacgaatgcacagtttctaaagctgttgcatttgtctgtggaatcataggttcccactaagaagaatttcagcattctggccagaaatttgaatacaattcaagttgaagaaatgtctgcctgtaacattagcatccagggtcccagcatatataataaggagcctaaaaatataataaatcctcatgaaaaagttcaaatgaagtcaatttgtgcaaattctcctataaaggcacaacaggatcaattacaagtaaaaaacaatataaaagcaagtcttcacaatgtcaaaagttccttacctctttttaatactaagtcctctacttctgtggggcagttgcagtctcctaccttgaattcacctatctatatgcaaaagcaaggaaaaaatgaacatcttgcatttaataccaaatctaaggcttcaacagttggttcagaattggtacttgtttctaccaccgttccaactgttcatcatgtttctgatttggaaatgagctctactctggactgtttacctgtgttggctgattgggaggatgtggttttactgccagcatctcagcctgaggaaaacgtagactgtacagttcccattagtgactcagacttagagatttcatttaattctggagaaagattaatggttttgaaagaattggaaatgtcaagtcatgaaaactttggagacatagaggaaactcctcaaaaatctgagacttctaagtctattgtgtacaagagtcctcacactactatttataatgtaaaagaagccaaagatccaggttcagatatttctgcctttaagttacctgaacacaaatcaagtaccttcaacagagttaatgccaatatgtctcatcctttagttttggggaaacatcctcttctttcaggtggtaccaaaaggaatccatgcagtccccaagctttcccaccagcaaaaaaacaacccttcactattcatgaagaaaagcctacatcatctgattgctccccagtaagaagttcttcctggaggcgtctcccatctatattaacttctacagttaacctacaagagccatggaagagtgggaaaatgacacctccattatgcaagtgtggtcggagatctaagagacttgttgtttctaataatggacctaaccatggaaaagtcttctattgttgccctatcgggaaataccaagaaaacagaaaatgttgtggttatttcaaatgggaacaaacacttcaaaaggaaagagccaacagcatggttccatctcattccacagggggactcacttttagttctccagaaacaagccatatttgtgacagaaatttaagtatttccaccaaaaattctttgagactcaggccttcaatgaggaattgataacctttcatgtatgaatcctaattgttccttgaatttccaaacatgagtattctgataacatcttacactattttatttttattttatatattaatgtttactgcatttaccatactttcttcaggaaccacaagtgtaatcttttgtaaacagtatttattagattacatataataagcaacaatagtatatgatccttcttttatagttagaccttgaaacaagtctaaactatttttaaattatttgcaaaaaatgtgactaataaaaatccctagtctattttcaggtagattcttgtactttgagattatcataatcttctaactggaattttatatttttctaaaaacttttataagttctttagttttatttcaggcttgaacattggttctgatttgtatatcaacatatcagaagaattagtcaactaaagtttgaaaacctatgtagcagagatctggttcagaaactgcttctatactatacatttaaaaattaatcagcaattgatggtattatttttatattaagaaatgataggaacattgacactaatgtggaggaatttgccaaatattttatttcaaaatttagcctctgatatcataaccacaagatattttaaatcaacagtttctaagcatactaccacagtttttatgacctctccatcatcttgtgtttctagagattgacagatacctatgttggtttatagatatggtaattaatgaaacaacttttaattgtcttccattctttctttcttaggtcatttcttttgtcttcccactgatagtctttgcagctcttgaataattctacctttctggggaatttggaaggggctgagtttttacatgctcctgaatctcctttatagtggtctgg

SEQ ID NO: 156 - DNA, 1285 bp, Homo sapiens
  CDS (335)..(1285)
taccgctccggaattcccgggtcgacgatttcgtgcgaaggcgggcggcagaggcgatcagaagtttccaagggtcacttgtgtctcgtccgtgggaagaccgggggagcccagaaggccttggtgtggaattctgagagctgattcctgccttgtcttctccactgttcctggaggaatccgagaagagcagagcggagggagccccagacacggtccgcgggagagctgtggggcttggtgagtgtttcgtggcctctcgggttggtcagcacccccagccagctggcccaggacccctctacagaagtccaggagagcaggcgtcaccaagatgtccaaccccttcctgaagcaagtcttcaacaaggacaagacattccgccccaagcgcaagtttgagccaggcacccagcgcttcgagctgcacaagaaggcgcaggcgtcgctgaacgccgggctggacctgcggctggccgtgcagttgcccccgggcgaggacctgaacgactgggtggctgttcacgtggtggacttctttaaccgcgtcaacctcatctacggcaccatcagcgacggctgcacggagcagtcctgccccgtcatgtcggggggccccaagtatgagtaccgctggcaggatgagcataagttccggaagcccacggcactctccgcgcccaggtacatggacctgctgatggactggatcgaggcgcagatcaacaacgaggacctcttccccaccaacgttggcactccgtttcccaagaacttcctgcagacggtgcggaagatcctgtcgcggctgttccgcgtgttcgtgcacgtctacatccaccactttgaccgcatcgcgcagatgggctccgaggcccacgtgaacacctgctacaagcacttctactatttcgtcaaggagttcggcctcatcgacaccaaggagctggagccactggtgcgcgggcttggggctgagggcgtgcggttacgctggcggccccggctggagttgggccccggggaccctgctgatgggacaagtggtgaggtagctgggagggatcctgcgttctcccacggaacaaatgccggcgacagatctgaaaatgctgactctctggcctcatggggtagcctgctgcccctggtctcagaaagaaatgaccgcccggatgtgccactgagagccccgcgggtctcccggtgcccgaaccgccgctggggcctcggagacttggaggaggacgctctggaaccatcatcccgcttctctccggcctga

SEQ ID NO: 157 - DNA, 1574 bp, Homo sapiens
  CDS (101)..(904)
atgctgcccctgctcgccgcgctcctggccgccgcctgcccgctgccgcccgtccgcggcggggccgcggacgcgcccggcctcctcggggtgccctccaatgcttcagtcaacgcgtcctccgcggacgagcccatcgccccgcggctgctggcctcggcggcccccgggccccccgagcgcccgggcccggaggaggcggcggcggcggcggcgcctgtgcaacatcagcgtgcagcggcagatgctgagctcgctgctcgtgcgctggggccgcccgcggggcttccagtgcgacctactgctcttctccaccaacgcgcacggccgcgctttcttcgccgccgccttccaccgcgtcgggccgccgctgctcatcgagcacctggggctggcggcgggcggcgcgcagcaggacctgcgcctctgcgtgggctgcggctgggtgcgcggtcgccgcaccggccgcctccggcccgccgccgcccccagcgccgccgccgccaccgccggggcgcccaccgcgctgccagcctaccccgcggccgagccgcccgggccgctgtggctgcagggcgagccgctgcatttctgctgcctagacttcagcctggaggagctgcagggcgagccgggctggcggctgaaccgtaagcccattgagtccacgctggtggcctgcttcatgaccctggtcatcgtggtgtggagcgtggccgccctcatctggccggtgcccatcatcgccggcttcctgcccaacggcatggaacagcgccggaccaccgccagcaccaccgcagccacccccgccgcagtgcccgcagggaccaccgcagccgccgccgccgccgccgctgccgccgccgccgcggccgtcacttcgggggtggcgaccaagtgacccgctccgctcctccctgtgtccgtcctgtgtccgcgcgcgcgggtgcctttcccgccggggactcggccggtgtgcttcgtgctgtagttatcgttagttcctcttcccgagatggggccgccgagagaccccagcgcctttgaaaagcaaggtttgtgctgcgcttccagttccgaaaagcagatgtttaagcccttggactgagggtgggatcgcagctccgaagacggagaggagggaaatggggccctttcccctctattgcatccccctgcccgactccttccccgcacccacgtgccctagattcatggcagaaaatgaccaaatcctgtgtatttgttttatatatttaataactgttttaaatgaaagttttagtaaaaaaaatacaaaacaaaaagattaaattgctattgctgtagtaagagaagctctttgtatctgaacatagttgtatttgaaatttgtggttttttaatttatttaaaattggggggagggcatgggaaggatttaacaccgatatattgttaccgctgaaaatgaactttatgaaccttttccaagttgatctatccagtgacgtggcctggtgggcgtttcttcttgtacttatgtggttttttggcttttaatacagacattttcctccaaaaaaaaaaaa

SEQ ID NO: 158 - DNA, 1974 bp, Homo sapiens
  CDS (315)..(809)
atgagtaagccagaatggttgatagtgggggaggatgatgacgacgctgcctttgcccctgtcttgtgtgaaacaactgcctgtgggtttcctgcagcgcagtggggagtgagaggagaaacgtcctgccgtgccacacccacgccctcccctgcgaacgcgcacgtgaacgggagcgcggacgcgcccgagaatgcgcttcacctcgcagaagcggcacctcggctgctgcccggcagcggcagcagctgcgtcggcggcccacacagcagcgagaggcgagaggaggctgcctcgaggaggctgcctcgaggatgaagtgcaaacccaaccagacgcggacctacgaccccgaggggttcaagaagcgggcggcgtgcctgtgcttccggagcgaacgcgaggacgaggtcctgttagtgagtagcagccggtacccggaccgctggatcgtgccgggcgggggcatggagcccgaggaggagccgggcggtgcggcggtccgagaggtgtacgaagaagcgggagtcaaggggaagttaggccggctcctgggcgtcttcgaacagaaccaggaccccaagcacagaacgtacgtgtatgtactgactgtcacggagctgctggaggattgggaagattcggttagcattgggaggaagcgagagtggttcaaagtcgaagatgccatcaaggttctccagtgccacaagcccgtgcacgccgaatatctggagaaactaaagctgggcggttccccaaccaatggaaactccatggccccatcctcgccagatagcgatccctaatgaacagcaaagatgttcagtattgtgctgaaagaaacattgatgtgaacccagtgatcagtggaattgtcaagtacaggtgagcacttctgtgttcccaagaagacagctcatctggtttcttcctgcatcttgggacactccttccctgtctataccactgactcttgctctggttgttgtactcttatacgtgaatagactcttaattcagcacctatagccttttgttgtgcttttttgatgtgtctgccttcattagactatgatgtctttgagagcaaagactatttttccttactctttgcatattctgcatctgagacactacttgaaatatggttggcatcactgaaggttctttgattcaattaatattttgtaatcaccgtgtggcaaaacattccccttccaatctggtgctagtagagtatatgctatctaggcaccatgtgtgtggcttttgtgtatcaggtgtttcagaaatatttcaagacagttgtaagatgtttgaggacaagaattattactcctatttctatgtcataccacacagtagctgcacagttttaagattatgccatcacctagggtaatgttttgtagaatcagtccttcgtgtaacaactctagtgtttttgtactgttgatgatttgcttaaattttattcaaaaactatcacttgctataaaggtaattgtaaaaataaatacagtggacgcaaaataatgttgtgagtttttataaaaataaattttaaaatgatatataagacatttttttgcaatgcctgccctaaccacttcttacatgtcatcttaacatctctttgaggaaacactgtttcctcattttacagatttaacatactgtattatttgatgccagagccaacaggctatatcataggcagtttccaaacttaattatgccatttagtttgtctagatttcttttgcctctctcactgatccatttggctgtagttttcatcccttttccagtacacacagctagctcctcatcctacctggtttctgcatatgagaatgcagagggctgagagagggcaaaattgttgtcatttagaaaaggcatttaggaaagaggctgctattagaggggaacacaaagtgaaggtttttttaaaaaagaggacttgca

SEQ ID NO: 159 - DNA, 2873 bp, Homo sapiens
  CDS (409)..(2757)
ttgaacgcctgatggaccgctctggaattcccgggtcgacccacgcgtccgcggacgcgtaggggccgagatcccgggcacgctggctctggtgagcgcggcctccgcggctccttggccccaggatgccctctctcgtggggaaaggagggtcgggaaaggccgagcgtaggtccaccttctccaatccctgcctgctgggagaggacgatctcttgagaaaggaaagacttctgtgctcccgagaacttcctatcaggtcctggctgcagggaaacaagctgggctttttataattaaggttggaagaagtcaccacaggcagcagaactccatcttgagatgaaataacatctacctggacctctggcagaatttcaaggcacacactgggctgactctggcgccatgatgttgccttatccttcagcactgggagatcaatactgggaagagattttgcttccaaagaatggggaaaatgtagagactatgaagaaattgacccaaaatcataaagcgaaaggcttgccttctaatgatactgactgcccccagaaaaaggagggaaaggcccaaatagtggtaccagttacattcagggatgtgactgtgatcttcacagaagcagaatggaagagactgagtccagagcagaggaatctatacaaagaagtgatgctggagaattacaggaatcttctctcattggaaaactttcattcttcagcagaaccaaagccagaaatctacacttgttcctcctgccttctggccttctcctgtcagcagttcctcagtcaacatgtacttcagatcttcctgggcttatgtgcagaaaatcacttccatccagggaattctagcccagggcattggaaacagcaggggcagcagtattcccatgtaagctgttggtttgaaaatgcagaaggtcaggagagaggaggtggctccaaaccctggtctgcaaggacagaggagagagaaacctcaagggcattccccagcccactccaaagacagtcagcaagtcctagaaaaggcaacatggtggtagaaacagagcccagctcagcccaaagaccaaaccctgtgcagctagacaaaggcttgaaggaattagaaaccttgagatttggagcaatcaactgtagagagtatgaaccggaccataacctggaatcaaactttattacaaacccgaggaccctcttagggaagaagccctacatttgcagtgattgtgggcgaagctttaaagatagatcaaccctcatcagacaccatcgtatacactcgatggagaagccttatgtgtgcagtgagtgcgggcgaggttttagccagaagtccaacctcagcagacaccagagaacacattcagaagagaagccttatttgtgcagggagtgtgggcaaagctttagaagtaagtccatcctcaatagacatcagtggactcactcagaggagaagccctatgtttgcagcgagtgtgggcgaggctttagcgagaagtcatccttcatcagacaccagaggacacactccggtgagaaaccctatgtgtgcctggagtgtggacgaagcttttgtgataagtcaaccctcagaaaacaccagaggatacactcaggggagaagccttatgtttgcagggagtgtgggcgaggctttagccagaactcagatctcatcaaacaccagaggacacacttggatgagaagccttatgtttgcagggagtgtgggcgaggcttttgtgacaagtcaaccctcatcatacacgagcggacgcactctggagagaagccttatgtgtgtggtgagtgtggccgaggctttagtcggaaatcactcctccttgtccaccagaggacacactcaggggagaagcattatgtctgcagggagtgtaggcgaggttttagccagaagtcaaatctcatcagacaccagaggacgcactcaaatgagaagccttatatttgcagggaatgtgggcgaggcttttgtgacaagtcaaccctcattgtacatgagaggacacactcaggagagaagccttacgtgtgcagatgtatgggcaaagcttttgtgatcacacaccacagggagaatctgcatgtggggacactgtggagctctgcccagatgaccttttcaggggtaacaccccagctgcttgagagaacagtgttgctgctggcagagatgcattccagagatgcactccgctctggaactcactctcagccacagggagctgcatgcaccacaggggcaatgcacctttgcaggggtaccttctggccccaacccttgactcaacggggacaactccagaaggtcattccagatccagagatccccatcgaactgaaggatcactgggttgcagacacattgcaggtcccacccataaatctcatcataatggcaattgaatttcaacatgaattttggaggagacattcacaccatagcatcaattacgcagtggctcctcagtcaggtctgatgagggaaaaggatgtgcatgtctgggagtgtgggcccccaccctttgccagaactgcccctataacaccaacttctgatcagaattggaggccactgagggaaaagaagggtcactatcaggacctttccactccatcccagaaggaaacagaattgaaacgtactagagtttctctcagaagaaagagagatgcaaattctccactccaggactatggctttggtgcctaagaaggaagagttcagtttttgtgtagagcttatttccaacatgagatgggtgttcaaatgcctgcagcatccaaacaagtcctgttaatgaggggaccagattgggtggggtgggg

SEQ ID NO: 160 - DNA, 2764 bp, Homo sapiens
  CDS (248)..(2305)
tttttttatgaggctgggaaaatagaacgaggaagtggtgacgcactgggctctcacgaatacaactagaagctgcaacgactgtgtggctctatcgattcgggagaggtccagaccggaaatggtcgtttccatggtaaccctgagcaggttgcctgggagatgacctctttcgggtctctttgaatctccgctgtagcgtcacctggaaggcagatctaacagagaacctggactgtctcctatcatgattcccgggaaatatcgctctgtttctggccgggctgcgaacaacgtgaactgcgggcttcatctggttattcaaacatcatcgcttcctgaaaaaaacaaagttgaattcaagctaaataaagacacatcgtcattccccggtagacttttacaacatgaccttgaaagaaactactcaagtaggcaaggggatcatattaatttggtgagctcatcattgtcatcatttcctattcttcaacgttcttctgaagagaaaattctttactcagacaggttgagcctagaaagacaaaagctgaccgtatgtcctatcatcaatggggaagaccaccttcgtttgttgaactttcaacacaattttataactcggatacaaaatatttctaatctacagaagttaatatcgttggatttatatgataaccagattgaagaaattagtgggctttcgactctgagatgtcttcgtgtccttctgttggggaaaaacagaatcaagaaaatctcaaatctggagaatctaaaaagcttagatgtcttggatcttcatggaaatcagattaccaaaattgaaaatattaatcatttgtgtgagttgagagttttaaatcttgccaggaactttttaagtcatgttgataatcttaatgggctggattcactaactgaacttaacttgcgacacaatcaaatcactttcgtgagagatgtggataatttgccctgcctccaacatctctttctcagctttaacaatatatctagttttgacagtgtttcctgccttgctgactcttcttccctctcggacaccacctttgatggcaatcccatagctcaagagtcatggtacaaacacactgtccttcagaatatgatgcagctgcgccagctagatatgaagagaatcacggaagaagaaaggcgtatggcatctgttttagccaaaaaagaggaagagaagaagcgggaaagtcataaacaatctttgcttaaggagaagaaaaggttaacaattaacaacgtagctcgacagtgggacttgcaacaacgagtagccaatattgctacaaatgaagatagaaaagattctgactctcctcaggacccctgtcagattgatggaagcaccctctctgcattcccagaggaaacagggcctctagactcaggactcaacaatgctttacaaggtttatctgtcatagacacataccttgttgaagtggacggggatacactttccctatatggctcaggagcactggaatctctggataggaattggagtgttcaaacagcaggaatgatcacaacagtctccttcactttcatagaatttgatgaaatcgtccaagtgcttcctaaactgaagattaagtttcctaattctctgcaccttaaattcaaggaaacaaatcttgtaatgctgcagcaatttaacgcactagcccaactccgtcgtattgaccagttgacaattgatcctcaaggaaatccagttgtcaattttacactctggaaatactatgtactgtttaggctaagccatttcagtatgcagaaaataaatggaacagaggtgacacagaatgatatgataatggctgaaaggctctttggaatcctagcacatgtagcatcttctgagttaccccagtatcgtctgatttccattctgggtgatgccaggaaaaagcaatttcggtatctactagaatccaaaggaaaaaaacctggtattatcaacgaagaaaataatgacagcaaaagacttgtaggagaaaacacaaatcgtgctacattaaattatactacaagagacttttataatgaaaagctagaggaaataaaggaaaagaagaaattctgtaaaacatatatagaagaccttgtgaaggaagccacagaaatcaacatgaaaaatgaggctttgcagaagctttggccacagatgttcattgagctcgttagggatgcagtcatagaaattcgcaataaaaattcctatatgaagctctgcctacagcagataacagaccaaaaataaaaatggcctttagttacagttgattttggcagttttattttttgaaggttgaaaatatgcaggttatacatgttaaaacaacaacaacactatcctataaactagaaagactagtataaaagcattattgcccactgttctcatagctaaaagttaagaaggaaagaaggaaagcaggagaaaggaaggattaattgcctgtatgtgaggaccaaacaacctttgggaactaaacagttttcagagatggcgtggcactgcatccttggttcttgctttgattggtgccctgctatagcccaaagcacgtagtatttgctgatgattcagcatgagctgcatctacctacttttagctgataattttcagttatttccctttttattttatgtcatgatttcaaagccaaaaatatgttctttttatgagtgaagaataaacttactaacaaattagtc

SEQ ID NO: 161 - DNA, 1156 bp, Homo sapiens
  CDS (95)..(508)
atttggccctcgaggccaagaattcggcacgaggggcaggctgcccgggccgtggcaggaagccggaagcagccgcggccccagttcgggagacatggcgggcgttaaagctctcgtggcattatccttcagtggggctattggactgacttttcttatgctgggatgtgccttagaggattatggcctgggtccaactgacagcgtttactggcccttattcgtcctgattttccacgccatctcccccatcccccatttcattgccaaaagagtcacctatgactcagatgcaaccagtagtgcctgtcgggaactggcatatttcttcactactggaattgttgtttctgcctttggatttcctgttattcttgctcgtgtggctgtgatcaaatggggagcctgcggccttgtgttggcaggcaatgcagtcattttccttacaattcaagggtttttccttatatttggaagaggagatgattttagctgggagcagtggtagcactttattctgattacagtgcattgaatttcttagaactcatactatctgtatacatgtgcacatgcggcattttactatgaaatttaatatgctgggttttttaatacctttatatatcatgttcactttaagaaagacttcataagtaggagatgagttttattctcagcaaatagacctgtcaaatttagattatgttactcaaattatgttacttgtttggctgttcatgtagtcacggtgctctcagaaaatatattaacgcagtcttgtaggcagctgccaccttatgcagtgcatcgaaaccttttgcttggggatgtgcttggagaggcagataacgctgaagcaggcctctcatgacccaggaaggccggggtggatccctctttgtgttgtagtccatgctattaaaagtgtggcccacagaccaagagcctcaacatttcctagagccttattagaaatgcagaatctgaagccccactctggacccaggacattttgatgagatccaaaggagttgtatgcacatgaaagtttgagaagcatcatcatagagaagtaaacatcacacccaacttccttatctttccagtggctaaaccacttaacctctctgggtgttacctgctcatttgttta

SEQ ID NO: 162 - DNA, 2545 bp, Homo sapiens
  CDS (350)..(952)
gttattatccccatatttaaaatggaggaaggccagagaggtaaagtggcttatcctaggacacccagctagtgaaggccaccagagccaggatgcctgattctaagtcaagagaatttctaccaccccacactggcagccgaaggaggcaggcagggcagcaaacaggcagtttccttccttctctccctggaaagatgacagccgtgacgccagtcctcctgagcccgccagccccaccatcggcctcgataagaagactcgccgaaagttcctggacctgggggtcaccctgcgccgagcatccacgggcaagagccggaaggagaaaggcagcaaccgactgtccatgggcagcagggagtcagtggaggggtccggcaggtcagggggctccccgttcctgcctttttcctggttcacggacagcggcaagggctcagcatcctcgggtagcaccacctcccccacctgctcccctaaacacgagggcttcagccctaagaagtcagcttcccaggaatccactctgagtgatgactccacgccccccagcagcagccccaagatccccagtgggccctggcaggaggccaaatgttcttacccctaccacacgctgtctcagtcttcagatgagttcctggatgaacccctcccccctgtccaccactggaccagccagcaggtgggccagtggctgcagagcctcaacctggaacagtatgctgctgagtttgctgcacggcaggtagacgggccgcagctgctgcagctggacggaagcaaactaaagagcctggggctcagcaactctcatgaccgggcactggtgaagcgcaagttgaaggagatggcagcagctgccgagaaggagcgcaaggcccaggagaaggctgcgcggcagcgggagaagctccggcgccgagagcaggaggccaagaagagctaggggagggtgcacaggcgctggcacccggcaggggcagccactggctccgcgggcacaggcctcaccagggaggctggacctgggcgctgcacttgggctagcctggtcccacgctctcaggggggacatgctctctcttaccctgtcacttggtctagacccagagaccccagaaagggagaccccagggagagggcctagtaataaatcctattttgaggacttgtttggcacagagttcctgggggaggagcagatgaaggggagagggcagagaggccagggctgaggcaagtctgggagcctgggtcaggctgtcccattgccctcaggccatcatggggctggggtggaggggagctaggaggcctgcctgcctgcttgcctgccagaggccctgaggccgggccccagggctcagagctgggctgggcatttcagcaggagcccatgtgggagcggctcctctccactcttccagggggctgtgtggtgggagagctctgtcctgctcccccaagaggccagtgggcgctgcagcaagtcgcactcagggtagactcccagccaaactcctcaacaggagcgcagagaaagcagcctggggcgagtgcagtctttgccaggactcaagaggggaggatgaacatccccttctccctctcccctcctctgtcctgtgggtcccagggggcgagatgacaccacacaggtctgcctctcagggcccattcaagacctggtctttgacccattctccaagccaggactcccttcacttcctgctgcttcctcagagggcacctaagtcctctttgggagctgagcaaacaggaactgatagggacagaggacaccacttccaccagccaaggcctaggagctgctgacctggtcagccctcaccccagccaggcagagaggcaaaacctgggggtccccggcagctacgagattggaaaggttcatcagccctcccccatctgccccaggcattgtcagggaatcagtgggctcagaactggcaggcggtgcaagctctgcttccctgggccacactgagggctggggccagctccctggatgggggtggagtttaccagcagcctggggacagcatgtgtcctttttaggaaatgtccttggaggaagtgttcatgtgtggcgctggtcagcagctagtcccgcttccaggacactggtcagagttaccgatgaggcctgggggctcccgcttggaaacccctccagctcctcccatctgcccagacagagcggcagatggcaccaatgcatgctggctccctcattcctgcccaggggctgtggcttacggccagcaccctgtacctgggactcagcccttatcccccctctgctatctgtgctgggagaggggcttcggagggaaacagatatgaggacactggcaccatctgggcctggtggcagggccatgggaggttggaaggcacccacatccttaaagccatcagtagctctagtgggtgcccacctgcatgtgaaggggaggcagttctcaatttatttcaataaatccttatgatgtgccagtgaccaaaaaaaaaaaaa

SEQ ID NO: 163 - DNA, 1595 bp, Homo sapiens
  CDS (976)..(1098)
atttggccctcgaggccaagaattcggcacgagcggcacgagcggcacgagcacagctgttggtttctgagcagcatggagtcacactggttcctcctggcctgaggggaaagagagacagagagagatcaacctggatgccttccttcacaataatctcatggaggtaatttaaagaatcctttttttggagagtcagagagaaaagcaaaaaaaaagagcatgaggaatttgaagactgagagatgagttgtgtagcaccaacattttctttctgcctgaccttcatacctgatgaattaaaagcataggatgtttggaagagtgagataagggacacattgaaaacagagaggcaatctgaaggctaccttgacgcatctgcaaagctcccagattctgactttcacaagacttgctttctgtttctgggcctcgcctaaacagactgccagtcatccgaaccgtggcaggatggagatgtttgtgtaaggtagactcaagtttgcaagactcaagaaggaaaccaccaaactaattttactttcacttaaaccagattgaaaccaagacttgaagaattaaaaactttgacattaaccattgattcactccaatgaaataattgtgttatagccagaatcatggtgaaattggaacaaggcttttgatgggatttttaattgagggacttatattaaattggatattttctttaatgaacagcatgtggccaaaattctattttcattaaagtatattaagcatcatgacaactcatattaaacctgcaacaaatgattaatgacatttagagacttcaaatgtcatgagacaccttaaatattaagaatcaaaaagaacacctcaaagttgtttctattcttagtaattatgcttaaaaaaacatctttccttgctttgaaagccagttgctaaaaataaaaactgttccatgaaaaatcacaatgcccaatgataaatttatgtatttgttttttaaagggggaggatggtgagaaaaatagaaagctcctggctgacatcagaggtcacaagatgagttcctcatttgtccaaatgacattcagctgctaaaagaagtcagacttttagagggctgttgaaaagacagtaagtcaggaggttttcagtacatgactgcaggggaatcagacacaggctagtcacttaagttgcttaattgtccgtgtacccttagcccacgacttcagggctcagcagcttcatccttcatggcaccaaaccttgacgtaagggattcaaagacacactcataagaatcgtgaatttgtcctcatgcaaaatttgggggactggctacaaaaccgaaacaaggagatcgtatccctaagtgaaagggactttatattaattgtcagttataacaatatgtaaaatacataaaagagatagagcactgcaggccatcaaggtcaaacatttgaaacagaattaaactaaattataaggaggattaaatggcttttgtctttgtaaagaaaagaatatgcatgcattgattgcctatgtagaaggattaataaatcttttggcatggtaaaaaaaaaaaa

SEQ ID NO: 164 - DNA, 5759 bp, Homo sapiens
  CDS (64)..(2562)
acctttgaggaagctgataagaatggtgacggcttgctgaatattgaagagatacatcagctgatgcataaactgaatgttaatctgccccgaagaaaagtcagacaaatgtttcaggaagccgacacagatgagaatcagggaactttgacatttgaagagttctgtgttttttacaaaatgatgtctttgagacgagacctttatttgttacttttgagctacagtgacaagaaagatcacctaactgtggaagaactggctcagtttttgaaggtggagcaaaagatgaataatgtgacaacggactattgtcttgacatcataaagaagtttgaagtttcagaagaaaataaggtgaaaaatgttcttggcatagaaggcttcacgaacttcatgcgtagtcctgcctgtgacatatttaacccattgcaccatgaagtgtaccaagacatggatcagcccctctgcaactactacattgcttcctctcacaatacatacctgactggagaccagctcctttctcagtccaaagtggatatgtatgcacgggtgctgcaagagggctgtcgctgtgtggaagttgactgttgggatggcccagatggagagccagtagtacatcatggttacactctcacttcaaaaattctcttcagagatgttgtggagaccatcaacaagcatgcctttgtgaagaatgagtttcctgttatattgtctatcgagaatcactgcagtatccagcagcaaaggaagattgctcagtacctgaaaggaatattcggagacaaactggacctgtcatctgttgatacaggggagtgcaagcagcttccaagccctcaaagtttgaaaggcaaaattctagtgaagggtaagaagttgccttatcaccttggggatgatgcagaggaaggggaagtttccgatgaggacagtgcagatgaaattgaagacgagtgcaaattcaagctccattatagtaatgggaccactgagcatcaggtggaatctttcataaggaaaaaactggagtcactgttaaaagaatctcaaattcgagataaagaagatcctgatagtttcacagtgcgggcactactgaaggccacgcatgaaggcttaaatgcacacctgaagcagagtccagatgtaaaggaaagtggaaagaaatcacatggacgatccctcatgaccaactttggaaaacataagaaaactacaaaatcacggtctaaatcttacagtactgatgatgaggaagacacacagcagagtactggcaaggagggtggccagctgtacagattgggtcgccgaaggaaaaccatgaagctctgccgagaactctctgatttggttgtgtacacaaactccgtggccgctcaggacattgtggatgacggaaccacaggaaatgtgttatcattcagtgaaacaagagcacatcaggttgttcagcaaaaatcagagcagttcatgatttataatcaaaagcaactcacgaggatttacccctctgcctaccgcattgattccagtaacttcaaccctctcccctactggaacgcaggctgccagctagtggcactgaattatcaatctgaaggacgaatgatgcagttaaaccgagccaaattcaaggcaaatggcaattgtggctatgtcctcaaaccccagcaaatgtgcaaaggtactttcaaccctttctctggtgaccctcttcctgccaaccccaaaaagcagctcatcctgaaagttatcagtggacagcaactccccaaacctccagactccatgtttggagatcgaggcgagatcattgacccttttgttgaagttgaaattattggattgccagtagattgttgtaaagatcaaacccgtgtggtagatgacaatggatttaaccctgtgtgggaagaaacactgacatttacagtacacatgccagaaatagctttggttcggttccttgtgtgggatcacgatcccattggacgagactttgttggacaaagaactgtgaccttcagcagcttagtgcctggctaccggcatgtctatttggaaggactgacagaagcatccatatttgtacacataaccatcaatgaaatctatggaaagtggagccctttaatactcaaccccagttatactatattgcactttctaggagctacaaagaacagacaactccagggtctgaagggactgttcaataagaatcctaggcacagttcttcagaaaacaattcccattatgtacggaagcgatccattggagatagaattctgcgacgcacagctagcgccccagccaaaggcaggaaaaagagcaaaatgggcttccaagaaatggtggagataaaggattctgtgtccgaggccacaagagatcaagatggcgtgctgaggaggaccacacgcagtttgcaagcacgccctgtctctatgcctgttgacagaaaccttctgggagctttgtcgctgcctgtatctgaaacagcaaaagacattgaaggaaaagaaaactctctagtacaaatctgaataggaaacaacttaagcagaagataaagatggcagaagaaaagggaaagcaagtataaaagatccacattttctaaatttcaacaaaaagttatcatcctcctccagtgctctgctccacaaagataccagccaaggggacaccattgtatctactgcccacatgtcagtcacaggagaacagctgggcatgtcaagtcctaggggtgggagaaccacatcaaatgccacaagcaattgccaggaaaacccctgtcccagcaagtctctctccccaaagcagcatttggctcccgatcctgtagttaaccccacacaagatctgcatggtgtgaaaatcaaggaaaagggtaatcctgaggactttgtggaagggaaaagcatcttgtcaggaagcgtcctttctcatagcaacctagaaattaagaacctggaaggtaataggggtaagggccgagctgcaacatccttttctttgtcagacgtctccatgctctgttctgacatacctgacctacattcaactgcaattctgcaggagagtgtaatttcccatcttattgacaatgtcactttaacaaatgagaatgagccgggcagttccatctcagccctgattggccagtttgatgagaccaacaatcaggctctcacagttgtttctcatcttcataataccagtgtgatgtcaggccattgtcccttgcctagcctgggcctaaaaatgcccatcaagcatggtttttgcaagggaaaatccaagtcttccttcctgtgctcatctccggagctgatagcactctcgagttctgagaccaccaaacatgcaacgaacacagtttatgaaactacctgcactcccatctctaaaaccaaaccagatgatgacctttctagtaaggccaagacagcggccttagaaagcaacctgcctggatcccctaatacttctcgtggctggttaccaaaaagtcctaccaagggagaagactgggaaacactgaagagctgcagccctgcctcttcccctgatttgaccctggaggatgtaatagctgatcccactctctgtttcaattctggggagagcagccttgtggaaattgatggagaatcagaaaatctttctctaacaacctgtgaatataggagagagggcacaagtcaacttgcttctcctttaaaactcaagtacaatcagggtgtggtagaacactttcaaagaggtttgagaaacggctactgtaaagagaccctccgcccttctgtccctgaaatattcaacaatattcaagatgtcaaaactcaaagtatttcttatctagcctatcagggtgctggctttgtgcataatcatttctcagattcagatgcaaaaatgttccagacctgtgtgccccagcaatctagtgctcaagatatgcatgtccctgtacccaagcagttggcacatcttcctttgcctgctctgaaactgcctagtccttgcaaatccaaaagtctgggggacttaacatcagaggacattgcctgcaattttgagagcaagtaccagtgtattagtaagagttttgttacaactggcattagagacaagaagggcgtgactgtgaagacaaagtcgttagagcctatagatgccctgaccgagcagcttcggaagcttgtgtcctttgaccaggaagacaactgccaagtgctatattcaaagcaggatgccaatcagctcccccgggcactggtcaggaagttgtcatccagaagtcagagcagagtgcgcaatattgctagtcgtgccaaggagaaacaggaagccaacaagcagaaagttccaaaccccagcaatggggcaggagtggttcttagaaacaaaccctcagcacccacccctgcagtgaatcgccactccaccggctcctacatcgcaggctacctgaagaacacgaaagggggtggccttgaaggccggggcatcccagagggggcatgcacggctcttcactatggccacgttgaccagttttgttcagataattctgttttgcagactgagccaagcagtgatgataaaccagaaatttattttcttttgagactgtgaattatttaaaactgcattcttaaggttttcaaggtattctgtagaatgtcagagttttcagtaaataagttccttggctttggaatgattttcaaatgtatttttaaacttgtatttgggtctccctttgacttcatgtgttctccctgttaatgcgtttgtatatagatttggtgacatttcccatgtacctattatgatctttctcccttgagttgttgtaaactgtatcagtatgaaatatgtgcatgccctagatgtgaaactcctcagcagctcgggttataatgtgtgtgtgtttcaccaagatgtcctttactgtgtcctcagattgcagtcacaaatgtagtcatttttactctctaactgttgagttgattaagagactttgcaaacgacaaagggatgaattccttactttaatctgttatcatttttcctatgtttccctctttgttcagaagcccagatgcatttttataactcagttttaaaaactttaaaatagttaccttgccttttaggatgttcttatcccacccataatgagagttgaaaggggatggatagctgctccccatgcccttcccactttttggaataggccgtgagggtgtgaggaagaaggctgtcttttgtacataaggacaaaattgtttgttttacataaattttgttacatatttttgctaatggctttgtatgtaacaagaagcgagttgccaaactacctgttgtacttttgaattttctgattgaattacagactgcgaacaacggctttcagaatgagggacttccatcagactctaatgataatagtagcacaaattgaaaacttccccaaagctttcacagaatattttctcataataaaatccaagtgaacagataattagaagaaacccttttccttcagggaaccaagcaactctattttagtactgacatgcattattttcactgtgaattcacttttttattgcatgttcagatgtccctctttgttttttttttttgtaacattaactgcaatgatgttcttcctggaattcatgaaaatataattaaaacacatttttaaacaaaaaaaaaa

SEQ ID NO: 165 - DNA, 2193 bp, Homo sapiens
  CDS (1)..(2193)
atgcctgaacctccccccgccccaggctcctgcgcagcccgagcctccaagacgagcgccgctcctggctccacggcgcccagtcccatccaccgttcaagggctgaggagcgtgggaccacggcgcggaactggcaggcagctccaactgcagccccggtgcgggatccactgggtgaagccagctgggctcctgagtctgctaatctagtgggaatctggagaacttttgtgtctagctcagggattgtaaatgcaccaatcagcaccctgtcaaaacggaccaatcagctctctgtaaaacagaccaatcggctctctgtaaaatggaccaatcagcaggatgtggcccgtggctcggcgacttacagggagggagaacatggctgctggcttttagcacctggtgggtttcgcgccttgcaactcgacaactgccgggacggagtctggctgcccgaccccctgcggcaggtgctgggcgaggcgcctcccctgcaactagcctgccgcttcccttccggcacccccgccgccagccccgagcgcggacctggagcggagaagagagtgtgcggaaaggatgtatcagaagtaacccactgcacacatgatctcttacatgctacattagaagactcctgggatgttagcagccagttagacaggcaacaggaaaactggaagagacatctgggatcagaggcatccacccagaagaaaataattacaccacaagaaaattttgagcaaaataaatttggtgaaaattctagattgaacaccaatttggttacacaactgaacattcctgcaagaataaggcctagtgaatgtgagacccttggaagcaatttgggacataatgcagacttacttaatgagaataatattcttgcaaaaaagaaaccctataagtgtgataaatgtagaaaagcctttattcatagatcatcgcttactaaacatgagaaaacacataaaggagagggagctttccctaatggaacagatcaaggaatttatcctggaaagaaacaccatgaatgtaccgactgtgggaaaacctttctctggaagacacagcttactgagcatcagagaattcacactggggagaaaccctttgaatgcaatgtatgtggaaaggccttcaggcatagctcatctcttggtcagcatgagaatgctcataccggagagaaaccctatcagtgtagtctctgtgggaaagccttccagcgcagctcctcccttgttcaacaccagcgaattcacactggagagaaaccctatcgatgtaatctatgtgggaggtcctttaggcatggcacatccctcactcaacacgaggtcacacacagtggagagaagcccttccagtgtaaggaatgtgggaaagcctttagtcgatgttcttcccttgtccaacatgagaggactcatactggagagaaaccttttgaatgtagcatatgtgggagggcttttggtcagagcccatccctttataaacatatgaggattcataagagaggcaaaccttaccaaagcagtaactacagcatagatttcaagcacagcacatctctcactcaagatgaaagcactcttaccgaagtgaaatcctaccattgtaatgactgtggggaagactttagtcacattacagactttactgaccatcagaggatccatactgcagagaacccctatgattgtgagcaggcttttagtcagcaagctatttctcatcctggagagaaaccctatcaatgtaatgtatgtgggaaagctttcaaaaggagtacaagtttcatagagcatcacagaattcatactggagagaaaccctatgaatgtaatgagtgtggagaagcctttagtcgacgctcatcgcttactcaacatgagagaacccacactggagagaaaccctatgaatgtattgactgtgggaaagcctttagtcaaagttcatctctcattcagcatgagagaactcatactggagagaagccctatgaatgtaatgaatgtgggagagccttccgaaaaaaaaccaacctgcatgatcatcagagaattcatactggagaaaaaccctattcttgtaaggaatgtgggaaaaacttcagccgaagttcagctcttactaaacaccagagaattcatactcgaaataaactctag

SEQ ID NO: 166 - DNA, 1365 bp, Homo sapiens
  CDS (110)..(511)
gaattgaagccggtacgcctgcaggtaccggtccggaattcccgggtcgacccacgcgtccggagatcccggggtcgcgcgagagccgcaagcggagttggtgggcgctatgctatcacccgaggcagagcgagtgctgcggtaccttgtagaagtggaggagctcgccgaggaggtgctggcggacaagcggcagattgtggacctggacactaaaaggaatcagaatcgagagggcctgagggccctgcagaaggatctcagcctctctgaagatgtgatggtttgcttcgggaacatgtttatcaagatgcctcaccctgagacaaaggaaatgattgaaaaagatcaagatcatctggataaagaaatagaaaaactgcggaagcaacttaaagtgaaggtcaaccgcctttttgaggcccaaggcaaaccggagctgaagggttttaacttgaaccccctcaaccaggatgagcttaaagctctcaaggtcatcttgaaaggatgagactcaagaaccaagatgggggaccagcaaccccccagggtcatggaggacccaggaccctccaaccttgacacctgtaaggacaggatctgccctgtaaggggccagccgtcaggaatctggccatgaaaacctctttgtagtgcttggctactctgtgatggcaggagggaaccttcagcctgtctggctgctggacctggacaccagggctcggtggacacaagatctattgacgggccttggtagccaccagtgggtgtgtggggcagtggctgtgggggtgtaagaatgactgcaacaggcacttcccaacaatggcctgctgttcacatggaccctgagcaaggaaggagggagggaggggcagagtggagtgtcattccagcattcctctcagaagggagagaggttttcaggctggtgccatgcgattggaataaagcaggaggctcatgggtggttgctgaatgaagaacagaatcttggtgctttgtggctcaccacagccatctgtggggcaggcacacacacctcccgccagctccaattttgcactttttccctgcttgattccaagagtaggtgctgcctagcagcccttcgtggccactctttactcaggagggccttgcagagtcctgcaccaggcctgggtgagtggatgcgcctcttaccatatgacacgtgtcaagatgcccttccgccccctctgaaagtggggcccggccagcactgctcgttactgtctgccttcagtggtctgaggtcccagtatgaactgccgtgaagtcaaaactcttatgtgttcattaagggctcaataaatgttagctgaatgaaaaaaaaaaaaa

SEQ ID NO: 167 - DNA, 2554 bp, Homo sapiens
  CDS (218)..(1132)
aaaataaaaaatccaaagttgccataaatcatagtatgagttctccatatatgttcacagagagaaagagattccctcacacctcttctacagtggatggaaaggtgcaaaaatctatcaccagcaacagaaggtgcagactgtgttggtggcggtaattttgtccatcaaatgaatatgtgtgaaaacattccctcctttggccctacaggtcagaatggcggcagcggagcatcgtcattcttcaggattgccctactggccctacctcacagctgaaactttaaaaaacaggatgggccaccagccacctcctccaactcaacaacattctataactgataactccctgagcctcaagacacctcccgagtgtctgctcactccccttccaccctcagctctaccctcagctccaccctcagcggatgataatctcaagacacgtgccgagtgtctgctccatccccttccaccctcagcggatgataatctcaagacactttccgagcgtcagctcactccccttccaccctcagctccaccctcagcagatgataatatcaagacacctgccgagcgtctgcgggggccgcttccaccctcagcagatgataatctcaagacaccttccgagcgtcagctcactccccttccaccctcagctccaccctcagcagatgataatatcaagacacctgccgagcgtctgcgggggccgcttccaccctcagcggatgataatctcaagacaccttccgagcgtcagctcactccccttccaccctcagctccaccctcagcagatgataatatcaagacacctgccgagcgtctgcgggggccgcttccaccctcagcggatgataatctcaagacaccttccgagcgtcagctcactccccttccaccctcagctccaccctcagcagatgataatatcaagacacctgccgagcgtctgcgggggccgcttccaccctcagcggatgataatctcaagacaccttccgagcgtcagctcactccctttccaccctcagctccaccctcagcagatgataatatcaagacacctgccgagcgtctgcggggagcgtctgcgggggccgcttccaccctcagcggatgataatctcaagacaccttccgagcgtcagctcactccccttccaccctcagctccaccctcagcagatgataatatcaagacacctgccgagcgtctgcgggggccgcttccaccctcagcggatgataatctcaagacaccttccgagcgtcagctcactccccttccaccctcagctccaccctcagcagatgataatatcaagacacctgccgagcgtctgcgggggccgcttccaccctcagcggatgataatctcaagacaccttccgagcgtcagctcactccccttccaccctcagctccaccctcagcagatgataatatcaagacacctgccgagcgtctgcgggggccgcttccaccctcagcagatgataatctcaagacaccttccgagcgtcagctcactccccttccaccctcagctccaccctcagcagatgataatatcaagacacctgccgagcgtctgcgggggccgcttccaccctcagcggatgataatctcaagacaccttccgagcgtcagctcactccctttccaccctcagctccaccctcagcagatgataatatcaagacacctgccgagcgtctgcggggagcgtctgcgggggccgcttccaccctcagcggatgataatctcaagacaccttccgagcgtcagctcactccccttccaccctcagctccaccctcagcagatgataatatcaagacacctgccgagcgtctgcgggggccgcttccaccctcagcggatgataatctcaagacaccttccgagcgtcagctcactccccttccaccctcagctccaccctcagcagatgataatatcaagacacctgccgagcgtctgcggggggccgcttccaccctcagccgatgataatctcaagacacctcccttagctactcaggaggctgaggcagaaaaaccacgcaaacccaagaggcagagggcggctgagatggaaccacctcccgaacccaagaggcagagggtcggtgacgtggaaccgtcacgcaaacccaagaggcggaggaccgctgacgtggaaccatcatcacccgaacccaagaggcggagggtcggtgatgtggaaccgtcacgcaaacccaagaggcggagggccgctgacgtggaaccatcatcacccgaacccaagaggcggagggtcggtgacgtggaaccgtcacgcaaacccaagaggcggagggccgctgacgtggaaccatcattacccgaacccaagaggcggaggttgagctgagaagaggccagtgcactcaagcctgagcaataagaataaaaccgagtagaacaaaataaaaaattcaaaaaacaaaacaaaacccacactccaaaaactaacaaagaataaataaataatataaaaataaaaaaaaaaaaa

SEQ ID NO: 168 - DNA, 2542 bp, Homo sapiens
  CDS (218)..(1120)
aaaataaaaaatccaaagttgccataaatcatagtatgagttctccatatatgttcacagagagaaagagattccctcacacctcttctacagtggatggaaaggtgcaaaaatctatcaccagcaacagaaggtgcagactgtgttggtggcggtaattttgtccatcaaatgaatatgtgtgaaaacattccctcctttggccctacaggtcagaatggcggcagcggagcatcgtcattcttcaggattgccctactggccctacctcacagctgaaactttaaaaaacaggatgggccaccagccacctcctccaactcaacaacattctataactgataactccctgagcctcaagacacctcccgagtgtctgctcactccccttccaccctcagctccaccctcagcggatgataatctcaagacacgtgccgagtgtctgctccatccccttccaccctcagcggatgataatctcaagacactttccgagcgtcagctcactccccttccaccctcagctccaccctcagcagatgataatatcaagacacctgccgagcgtctgcgggggccgcttccaccctcagcagatgataatctcaagacaccttccgagcgtcagctcactccccttccaccctcagctccaccctcagcagatgataatatcaagacacctgccgagcgtctgcgggggccgcttccaccctcagcggatgataatctcaagacaccttccgagcgtcagctcactccccttccaccctcagctccaccctcagcagatgataatatcaagacacctgccgagcgtctgcgggggccgcttccaccctcagcggatgataatctcaagacaccttccgagcgtcagctcactccccttccaccctcagctccaccctcagcagatgataatatcaagacacctgccgagcgtctgcgggggccgcttccaccctcagcggatgataatctcaagacaccttccgagcgtcagctcactccctttccaccctcagctccaccctcagcagatgataatatcaagacacctgccgagcgtctgcggggagcgtctgcgggggccgcttccaccctcagcggatgataatctcaagacaccttccgagcgtcagctcactccccttccaccctcagctccaccctcagcagatgataatatcaagacacctgccgagcgtctgcgggggccgcttccaccctcagcggatgataatctcaagacaccttccgagcgtcagctcactccccttccaccctcagctccaccctcagcagatgataatatcaagacacctgccgagcgtctgcgggggccgcttccaccctcagcggatgataatctcaagacaccttccgagcgtcagctcactccccttccaccctcagctccaccctcagcagatgataatatcaagacacctgccgagcgtctgcgggggccgcttccaccctcagcagatgataatctcaagacaccttccgagcgtcagctcactccccttccaccctcagctccaccctcagcagatgataatatcaagacacctgccgagcgtctgcgggggccgcttccaccctcagcggatgataatctcaagacaccttccgagcgtcagctcactccctttccaccctcagctccaccctcagcagatgataatatcaagacacctgccgagcgtctgcggggagcgtctgcgggggccgcttccaccctcagcggatgataatctcaagacaccttccgagcgtcagctcactccccttccaccctcagctccaccctcagcagatgataatatcaagacacctgccgagcgtctgcgggggccgcttccaccctcagcggatgataatctcaagacaccttccgagcgtcagctcactccccttccaccctcagctccaccctcagcagatgataatatcaagacacctgccgagcgtctgcggggggccgcttccaccctcagccgatgataatctcaagacacctcccttagctactcaggaggctgaggcagaaaaaccacgcaaacccaagaggcagagggcggctgagatggaaccacctcccgaacccaagaggcagagggtcggtgacgtggaaccgtcacgcaaacccaagaggcggaggaccgctgacgtggaaccatcatcacccgaacccaagaggcggagggtcggtgatgtggaaccgtcacgcaaacccaagaggcggagggccgctgacgtggaaccatcatcacccgaacccaagaggcggagggtcggtgacgtggaaccgtcacgcaaacccaagaggcggagggccgctgacgtggaaccatcattacccgaacccaagaggcggaggttgagctgagaagaggccagtgcactcaagcctgagcaataagaataaaaccgagtagaacaaaataaaaaattcaaaaaacaaaacaaaacccacactccaaaaactaacaaagaataaataaataatataaaaataaaaaaaaaaaaa

SEQ ID NO: 169 - DNA, 2532 bp, Homo sapiens
  CDS (218)..(1756)
aaaataaaaaatccaaagttgccataaatcatagtatgagttctccatatatgttcacagagagaaagagattccctcacacctcttctacagtggatggaaaggtgcaaaaatctatcaccagcaacagaaggtgcagactgtgttggtggcggtaattttgtccatcaaatgaatatgtgtgaaaacattccctcctttggccctacaggtcagaatggcggcagcggagcatcgtcattcttcaggattgccctactggccctacctcacagctgaaactttaaaaaacaggatgggccaccagccacctcctccaactcaacaacattctataactgataactccctgagcctcaagacacctcccgagtgtctgctcactccccttccaccctcagctctaccctcagctccaccctcagcggatgataatctcaagacacgtgccgagtgtctgctccatccccttccaccctcagcggatgataatctcaagacactttccgagcgtcagctcactccccttccaccctcagctccaccctcagcagatgataatatcaagacacctgccttccaccctcagcagatgataatctcaagacaccttccgagcgtcagctcactccccttccaccctcagctccaccctcagcagatgataatatcaagacacctgccgagcgtctgcgggggccgcttccaccctcagcggatgataatctcaagacaccttccgagcgtcagctcactccccttccaccctcagctccaccctcagcagatgataatatcaagacacctgccgagcgtctgcgggggccgcttccaccctcagcggatgataatctcaagacaccttccgagcgtcagctcactccccttccaccctcagctccaccctcagcagatgataatatcaagacacctgccgagcgtctgcgggggccgcttccaccctcagcggatgataatctcaagacaccttccgagcgtcagctcactccctttccaccctcagctccaccctcagcagatgataatatcaagacacctgccgagcgtctgcggggagcgtctgcgggggccgcttccaccctcagcggatgataatctcaagacaccttccgagcgtcagctcactccccttccaccctcagctccaccctcagcagatgataatatcaagacacctgccgagcgtctgcgggggccgcttccaccctcagcggatgataatctcaagacaccttccgagcgtcagctcactccccttccaccctcagctccaccctcagcagatgataatatcaagacacctgccgagcgtctgcgggggccgcttccaccctcagcggatgataatctcaagacaccttccgagcgtcagctcactccccttccaccctcagctccaccctcagcagatgataatatcaagacacctgccgagcgtctgcgggggccgcttccaccctcagcagatgataatctcaagacaccttccgagcgtcagctcactccccttccaccctcagctccaccctcagcagatgataatatcaagacacctgccgagcgtctgcgggggccgcttccaccctcagcggatgataatctcaagacaccttccgagcgtcagctcactccctttccaccctcagctccaccctcagcagatgataatatcaagacacctgccgagcgtctgcggggagcgtctgcgggggccgcttccaccctcagcggatgataatctcaagacaccttccgagcgtcagctcactccccttccaccctcagctccaccctcagcagatgataatatcaagacacctgccgagcgtctgcgggggccgcttccaccctcagcggatgataatctcaagacaccttccgagcgtcagctcactccccttccaccctcagctccaccctcagcagatgataatatcaagacacctgccgagcgtctgcggggggccgcttccaccctcagccgatgataatctcaagacacctcccttagctactcaggaggctgaggcagaaaaaccacgcaaacccaagaggcagagggcggctgagatggaaccacctcccgaacccaagaggcagagggtcggtgacgtggaaccgtcacgcaaacccaagaggcggaggaccgctgacgtggaaccatcatcacccgaacccaagaggcggagggtcggtgatgtggaaccgtcacgcaaacccaagaggcggagggccgctgacgtggaaccatcatcacccgaacccaagaggcggagggtcggtgacgtggaaccgtcacgcaaacccaagaggcggagggccgctgacgtggaaccatcattacccgaacccaagaggcggaggttgagctgagaagaggccagtgcactcaagcctgagcaataagaataaaaccgagtagaacaaaataaaaaattcaaaaaacaaaacaaaacccacactccaaaaactaacaaagaataaataaataatataaaaataaaaaaaaaa

SEQ ID NO: 170 - DNA, 2541 bp, Homo sapiens
  CDS (218)..(1762)
aaaataaaaaatccaaagttgccataaatcatagtatgagttctccatatatgttcacagagagaaagagattccctcacacctcttctacagtggatggaaaggtgcaaaaatctatcaccagcaacagaaggtgcagactgtgttggtggcggtaattttgtccatcaaatgaatatgtgtgaaaacattccctcctttggccctacaggtcagaatggcggcagcggagcatcgtcattcttcaggattgccctactggccctacctcacagctgaaactttaaaaaacaggatgggccaccagccacctcctccaactcaacaacattctataactgataactccctgagcctcaagacacctcccgagtgtctgctcactccccttccaccctcagctctaccctcagctccaccctcagcggatgataatctcaagacacgtgccgagtgtctgctccatccccttccaccctcagcggatgataatctcaagacactttccgagcgtcagctcactccccttccaccctcagctccaccctcagcagatgataatatcaagacacctgccgagcgtctgcgggggccgcttccaccctcagcagatgataatctcaagacaccttccgagcgtcagctcactccccttccaccctcagctccaccctcagcagatgataatatcaagacacctgccgagcgtctgcgggggccgcttccaccctcagcggatgataatctcaagacaccttccgagcgtcagctcactccccttccaccctcagctccaccctcagcagatgataatatcaagacacctgccgagcgtctgcgggggccgcttccaccctcagcggatgataatctcaagacaccttccgagcgtcagctcactccccttccaccctcagctccaccctcagcagatgataatatcaagacacctgccgagcgtctgcgggggccgcttccaccctcagcggatgataatctcaagacaccttccgagcgtcagctcactccctttccaccctcagctccaccctcagcagatgataatatcaagacacctgccgagcgtctgcgggggccgcttccaccctcagcggatgataatctcaagacaccttccgagcgtcagctcactccccttccaccctcagctccaccctcagcagatgataatatcaagacacctgccgagcgtctgcgggggccgcttccaccctcagcggatgataatctcaagacaccttccgagcgtcagctcactccccttccaccctcagctccaccctcagcagatgataatatcaagacacctgccgagcgtctgcgggggccgcttccaccctcagcggatgataatctcaagacaccttccgagcgtcagctcactccccttccaccctcagctccaccctcagcagatgataatatcaagacacctgccgagcgtctgcgggggccgcttccaccctcagcagatgataatctcaagacaccttccgagcgtcagctcactccccttccaccctcagctccaccctcagcagatgataatatcaagacacctgccgagcgtctgcgggggccgcttccaccctcagcggatgataatctcaagacaccttccgagcgtcagctcactccctttccaccctcagctccaccctcagcagatgataatatcaagacacctgccgagcgtctgcggggagcgtctgcgggggccgcttccaccctcagcggatgataatctcaagacaccttccgagcgtcagctcactccccttccaccctcagctccaccctcagcagatgataatatcaagacacctgccgagcgtctgcgggggccgcttccaccctcagcggatgataatctcaagacaccttccgagcgtcagctcactccccttccaccctcagctccaccctcagcagatgataatatcaagacacctgccgagcgtctgcggggggccgcttccaccctcagccgatgataatctcaagacacctcccttagctactcaggaggctgaggcagaaaaaccacgcaaacccaagaggcagagggcggctgagatggaaccacctcccgaacccaagaggcagagggtcggtgacgtggaaccgtcacgcaaacccaagaggcggaggaccgctgacgtggaaccatcatcacccgaacccaagaggcggagggtcggtgatgtggaaccgtcacgcaaacccaagaggcggagggccgctgacgtggaaccatcatcacccgaacccaagaggcggagggtcggtgacgtggaaccgtcacgcaaacccaagaggcggagggccgctgacgtggaaccatcattacccgaacccaagaggcggaggttgagctgagaagaggccagtgcactcaagcctgagcaataagaataaaaccgagtagaacaaaataaaaaattcaaaaaacaaaacaaaacccacactccaaaaactaacaaagaataaataaataatataaaaataaaaaaaaaaaaa

SEQ ID NO: 171 - DNA, 1196 bp, Homo sapiens
  CDS (174)..(812)
atgtggccctcgagcccaagaattcggcacgagggccgggagctaactaccgcgccggggccgggtccggggccggggcccgacgtccccgcggggcccgggaccgcgaggaggacggcgggggcctggagcccgcggccgtggcccgcgacctattgaggggcacatctaacatgtcatttgaggagctgttggaattgcagagccaagtggggactaagacgtacaaacaattggtagctggaaatagtcctaagaaacaagcttctagaccacctatccaaaatgcatgtgttgcagataagcacaggcctctggaaatgtcagccaagatccgagtaccatttttacgtcaggttgttcccattagtaaaaaggtagcccgggaccctcgctttgatgatctgtcaggggaatataatcctgaggtgtttgacaaaacataccaattcttgaatgacatccgagcgaaagagaaagagcttgtgaaaaaacagttgaagaagcacctttcaggagaggagcatgagaaactgcagcaactgcttcagcgaatggagcagcaagaaatggcacagcaggaacgaaagcaacagcaggagctgcacctggccctgaagcaagaacgtcgggctcaggcccagcagggccatcggccatacttcctgaaaaaatctgagcagcgccagttggcactagctgagaagttcaaggagctgaaacgcagcaagaaattggagaacttcttgagtcgaaagaggcgacgaaatgcaggcaaggacaggagacatctccctttgagcaaagagtaataaggaactatcctctgctctgccactgccccagggagacatggatctgtgaggacagatttggccacggctggtttccgttcaagggcaaggatcacagctgcccttgaatctcattgcctcagagaagactagagggctcttggactatccctagggctacacaagaatagttcagccttctgccatgccacacagcctcagcttgaatctggttcattgcgtcctcgtgttcttctctcatccttgccttaaaccagggattctgataccgaagaagaggggccaatgaaaaccatggagtctgttcgtgactcccagggctgggacattatgtaggagccacttcataaacattctctttactcatcaaaaaaaaaaaaa

SEQ ID NO: 172 - DNA, 2306 bp, Homo sapiens
  CDS (223)..(1947)
tcattaataagacaaactactggtgaaaaaaagaaccctttccgatattttagtaaacaagaattaagagagctctttacaatcgaggatcttcagaactctgtaacccagctgcagcttcagtctttgcatgctgctcagaggaaatctgatataaaactagatgaacatattgcctacctgcagtctttggggatagctggaatctcagaccatgatttgatgtacacatgtgatctgtctgttaaagaagagcttgatgtggtagaagaatctcactatattcaacaaagggttcagaaagctcaattcctcgttgaattcgagtctcaaaataaagagttcctgatggaacaacaaagaactagaaatgagggggcctggctaagagaacctgtatttccttcttcaacaaagaagaaatgccctaaattgaataaaccacagcctcagccttcacctcttctaagtactcatcatactcaggaagaagatatcagttccaaaatggcaagtgtagtcattgatgatctgcccaaagagggtgagaaacaagatctctccagtataaaggtgaatgttaccaccttgcaagatggtaaaggtacaggtagtgctgactctatagctactttaccaaaggggtttggaagtgtagaagaactttgtactaactcttcattgggaatggaaaaaagctttgcaactaaaaatgaagctgtacaaaaagagacattacaagaggggcctaagcaagaggcactgcaagaggatcctctggaaagttttaattatgtacttagcaaatcaaccaaagctgatattgggccaaatttagatcaactaaaggatgatgagattttacgtcattgcaatccttggcccattatttccataacaaatgaaagtcaaaatgcagaatcaaatgtatccattattgaaatagctgatgacctttcagcatcccatagtgcactgcaggatgctcaagcaagtgaggccaagttggaagaggaaccttcagcatcttcaccacagtatgcatgtgatttcaatcttttcttggaagactcagcagacaacagacaaaatttttccagtcagtctttagagcatgttgagaaagaaaatagcttgtgtggctctgcacctaattccagagcagggtttgtgcatagcaaaacatgtctcagttgggagttttctgagaaagacgatgaaccagaagaagtagtagttaaagcaaaaatcagaagtaaagctagaaggattgtttcagatggcgaagatgaagatgattcttttaaagatacctcaagcataaatccattcaacacatctctctttcaattctcatctgtgaaacaatttgatgcttcaactcccaaaaatgacatcagtccaccaggaaggttcttttcatctcaaatacccagtagtgtaaataagtctatgaactctagaagatctctggcttctaggaggtctcttattaatatggttttagaccacgtggaggacatggaggaaagacttgacgacagcagtgaagcaaagggtcctgaagattatccagaagaaggggtggaggaaagcagtggcgaagcctccaagtatacagaagaggatccttccggagaaacactgtcttcagaaaacaagtccagctggttaatgacgtctaagcctagtgctctagctcaagagacctctcttggtgcccctgagcctttgtctggtgaacagttggttggttctccccaggataaggcggcagaggctacaaatgactatgagactcttgtaaagcgtggaaaagaactaaaagagtgtggaaaaatccaggaggccctaaactgcttagttaaagcgcttgacataaaaagtgcagatcctgaagttatgctcttgactttaagtttgtataagcaacttaataacaattgagaatgtaacctgtttattgtattttaaagtgaaactgaatatgagggaatttttgttcccataattggattctttgggaacatgaagcattcaggcttaaggcaagaaagatctcaaaaagcaacttctgccctgcaacgccccccactccatagtctggtattctgagcactagcttaatatttcttcacttgaatattcttatattttaggcatattctataaatttaactgtgttgtttcttggaaagttttgtaaaattattctggtcattcttaattttactctgaaagtgatcatctttgtatataacagttcagataagaaaattaaagttacttttctcaaaaaaaaaaaa

SEQ ID NO: 173 - DNA, 1537 bp, Homo sapiens
  CDS (64)..(1251)
tcatccaaatccttctctctgaaggcactacagaaccacgtcggggaagctcttcccccagagatggtcaccaggctgtatgatggcatgcggagggtcgacctgacagggaaggcgaagggacccagtgagaacgtgtcccaggagcagttcacagcatccatgtcccacctgttgaaaggaaactccgaggagaagagtctcatgattatgaaaatgatttctgccacagaaggtcccgtgaaggccagagaagtccaaaagtttacagaggatctggttggctctgtggtgcacgtgctaagccacagacaggagctgagaggctggactgggaaggaagccccagggcccaacccccgggtgcaggtgctggctgctcagctgctctctgagatgaagctgcaagatggcaagagacttctggggccccagtggctggactatgactgtgaccgagctgtgatcgaggactgggtgttcagggtcccccatgtggccatattcctgagtgtggtcatttgcaagggctttctcgtcctgtgctcgtctcttgatctgactaccctggtccctgagcgtcaagtggaccagggcaggggttttgagagcatcctggatgtcctctctgtcatgtacatcaacgcccagctgcctcgggagcagcggcaccgctggcgcctgctcttttcgtctgagctccatggacacagcttctcccagctctgtggccacatcactcaccgggggccctgtgtggctgtcctcgaggaccatgacaagcatgtgttcggagggtttgcctcttgctcttgggaggtgaagcctcagtttcaaggggacaacagatgcttcctgttctccatctgccccagcatggctgtgtacacacacacgggctacaacgaccactacatgtacttgaaccatggacagcagacgatcccgaacggactgggtatgggggggcagcacaattactttgggctttgggtggatgttgattttgggaaaggacacagcagagccaagcccacgtgcaccacgtacaacagcccgcagctgtcggctcaggagaacttccagtttgataagatggaggtgtgggcggttggagacccctcagaggagcagttggccaagggcaacaagagcatcctggatgcggaccctgaggcccaggccctgctggagatcagtgggcattcgcgccacagcgaagggctccgggaagtcccggacgatgaatgaggagccgcctgagccttcctggagccaggacctggattcctctgggtagagggcaccgcctgcagcccctcttccctcccacatggtttaactgtaatagcgtaccgcacgggtcacagcctggtagtcccacatgtgccaagaagacgccctctgaagccatgtcctgactcatgggtggatctcccagaaatagatgttttttaagttttcttttttgccctacagggtcaccctcaggatctctccaagaaatcttgtgtcaaattagtaaaaaaaaaaaaaa

SEQ ID NO: 174 - DNA, 2222 bp, Homo sapiens
  CDS (100)..(1785)
tgagataaagacttaattcgggccacctcaggagctgccacccctgtcatagcatttttattatcaaatctggcactcacaagccctggccgacccccaatgggttttaccactccccctctagaccctgtcttgcaaaatcctctccctagccagctagtattttctgggctaaagactgtacaaccagttcctccattttatagaagtttactcactccaggggaaatggtgagtcctccaacctccctcccaaccagtcccatcattccaaccagtggtaccatagagcagcaccccccgccaccctctgagccagtagtgccagcagtgatgatggccacccatgagcccagtgctgacctggcacccaagaaaaagcccaggaagtcaagcatgcctgtgaagattgagaaggaaattattgataccgccgatgagtttgatgatgaagatgatgaccccaatgatggtggagctgtggtcaatgacatgagccatgacaatcattgtcactcccaagaggagatgagcccaggcatgtctgtgaaggacttttctaagcataacaggacccggtgcatttcaaggactgaaataaggagggccgacagcatgacttctgaagaccaagaacctgagcgggactatgagaacgagtctgagtcttcggagcccaaactgggcgaggaatccatggaaggggatgagcacattcacagcgaagtgagtgaaaaagtcctgatgaatagtgagaggcctgatgagaaccacagtgagccctctcaccaggacgtcatcaaggtgaaggaagaatttacagaccccacttacgacatgttttacatgagccagtatggactgtacaatggtgggggtgccagcatggccgccttgcatgagagctttacatcgtctctgaattatggcagccctcaaaagttctccccagaaggtgacctatgttctagcccagaccccaaaatctgttatgtgtgcaagaagagtttcaaaagctcctacagtgtgaaacttcactacaggaacgttcacttgaaagagatgcacgtctgcacagtggctggttgcaatgctgcattcccctctcgccgaagccgagacagacacagtgccaacataaacctacatcgtaaactgttgaccaaagaactcgatgacatgggcctggactcgtcgcagccctcccttagcaaggacctccgcgatgaatttttggtgaagatatatggtgcccagcaccccatggggctcgatgtcagggaagacgcctcctctcccgcagggactgaagactcccacctgaacgggtatgggagaggcatggcagaggactacatggtccttgacttgagcaccacctccagcctccagtccagcagcagtatccattcctccagagaatccgacgcaggcagcgatgaggggattcttctcgatgacattgacggggcgagtgacagtggggagtcggcacacaaggccgaggcccctgccctccctggcagcctaggggctgaagtttcaggatctcttatgttcagcagcttgtctgggagcaatggtgggatcatgtgcaacatttgccacaaaatgtacagcaacaaggggaccctgagagtgcactacaaaactgtgcatttgagagaaatgcacaagtgcaaagtcccaggttgcaatatgatgttttcctctgtacgaagccgaaatcggcacagtcagaaccctaatctccacaaaaacattcccttcacttcagtagattagtctcagaatggacactacaaatgccagctctcaccagatggcctacgtgtttgaactgccatagtcagtgtgcgcttatgtacttggggtgtgtgtgtgtgtgtgtgtgtgtgtgtgtgtgtgcatttatgtatgctctgtggctacatatacacacacgtatttccttgagataaacaagataaacactaggtgcttttgaatttttttcacttccctttatagttttgggaaaggagtgggatctttgatttcagggtgaaaacagagtacccctttaaacacacacacacacacatgcacatacacacacacacacacacacacacacagtgtgcaactagccccagttttgacagaataattcttggtcttccccaaagagacaatttgttgtacccatgactgttgcctgcaaaaataaaagggaaaaaaaa

SEQ ID NO: 175 - DNA, 1098 bp, Homo sapiens
  CDS (443)..(757)
gccctcactaaagggaataagcttgcgtccgccgccttcgccaggaccgtcggagggcacagctctgtgacggcgctctctgtgtgtctcgcacctgccctgtgtggattcctggctttaactaaacgcagcctctcatcctcagcacgcgtgtcagaggaggaggagctggaggccctctcagtggccagcacctgccagcttgtctgggactctccagcagctgccgggaggcatcgtgtgtgtgtcacctgtcactccctggacggcaagtgccagctgaagcgcagagccctcgcccgcctactatgagttcatcggcgtcagcggctgccaggacgtgctgcacctgtaccgcctgctctgggcctctgcagttctgaacgtcctgggcctgttcctgggcatcatcaccgccgccgtcctgggggccttcaaggacatggtgcctctgtcccagctggcctatggcccagccgtcccaccacagaccctctacaaccccgcccagcagatcctggcctacgcaggcttccgcctgacgcccgagcccgtcccgacctgctcgtcctaccctctgccccttcagccctgcagccgcttcccagttgcgccctcctctgccctggcttcgtctgaggacctgcagcccccttctccaagcagctctggctctgggcttcccggccaggctccaccgtgctacgcacccacctactttcccccgggggagaagccacccccctacgcaccctgatagaggcgtggagtaaaagataacttgtttgtttttttttttaaaaaaaaggcagcctctagaaatcccgcttctgtggccaacctcctagagaacccgggagaatgttccagaagtctgtcccctcctttcctccctgggcacactggtgagggaggctggaaccaggcagggagtggggccctccagacccaggctggtgacaccttggcttgggctctgctcacatcaaatggcgctgaaagttcccacccggcctcctcctctgagagcaattgttctggtgttttcacatcccttaattaattagctattattatgattttgcaaaaaaaaaaaaa

SEQ ID NO: 176 - DNA, 3739 bp, Homo sapiens
  CDS (559)..(2157)
attgaattgcgatgacgtatataactatctattcgatgatgaagataccccaccaaacccaaaaaaagagatctctcgaggatccgaattcgcggccgcgtcgacgcggaaggagaagatgtgccgccgctgccaacgtcgagcggcgacggctgggaaaaagatcttgaagaagctctggaagcaggaggttgtgatcttgaaacgttgagaaatataattcaaggaagaccgctgcctgctgatctgagggccaaagtttggaagattgctctgaatgttgcaggaaaaggtgatagtttggcatcatgggatggtattttagacttgccagaacagaacactattcacaaagattgcctgcagtttattgaccagctttcagtgccagaggagaaggcagcagaattacttttggatattgaatctgtaattaccttttattgtaaatcacgtaacattaaatatagcacatcccttagctggatacatctactgaaaccattggtgcatcttcaactgccacgcagcgatttatacaactgcttttatgccataatgaataagtacattcccagggattgttcccagaaagggagaccatttcatctcttcaggttgctcatccaataccatgagcctgagctttgttcttatcttgatacaaagaaaattactccagactcctatgcactcaactggcttggaagtctttttgcatgttactgttccactgaagtcactcaggcaatatgggatggatatctacaacaagcagatccattttttatttatttcttaatgttaattatccttgttaatgcaaaagaagttattttaacacaagagtcagacagcaaagaagaagttatcaagttcttggaaaatactccatccagtctgaatatagaagatatagaagaccttttctctctggctcagtattattgcagcaaaacaccggcttcttttaggaaggataatcaccatctctttggtagtactttgttgggaattaaggatgatgatgcagatctgagtcaggctctttgtctggccatctccgtgtcagagatccttcaagcgaatcagctacaaggggaaggagtccggttctttgtggtggattgccgtcctgcagaacaatataatgctgggcatttatcaactgctttccacttagattcagacctgatgcttcagaatccatctgagtttgcacagtcagtaaaatccttgctggaagcacagaagcagtccattgagtctggctccatagctggtggggagcacctctgttttatgggcagtggcagggaggaagaagacatgtatatgaacatggtcctggcacactttttacagaaaaacaaagaatatgtgagtattgccagtggaggatttatggcactgcagcagcacctggcagacattaatgtggatggaccagaaaatggatatggccattggattgctagtacctcaggctcaaggagcagtatcaattctgttgatggtgaatctcctaatggctcaagtgatagaggaatgaaatcactagtaaataaaatgactgtggctttgaagacaaaatccgttaatgtcagggaaaaagttatcagttttatagagaatacatcaactcctgtggatcggcatgtgagcagcagtgacagagtgggcaagccttaccgtggcgtaaagcctgttttcagcattggggatgaagaagaatacgacacagatgaaattgacagttcttcaatgtcagatgatgatagaaaagaggttgtaaacattcagacttggataaacaaaccagatgtcaaacatcattttccttgtaaagaagtaaaagaaagtggacacatgtttcccagtcatctgttggttactgcaacacatatgtactgtttaagggagattgtttcacggaaaggattggcttatatacagtctcgacaagcgctgaattctgtagttaaaattacatccaaaaaaaaacatcctgaactcattaccttcaagtatggaaatagcagtgcttcaggaatagaaatcttggcaatcgaaaggtatttgattccaaatgcaggggatgcaactaaagccataaaacagcagatcatgaaagttttggatgctttggaaagttaatataaaagaaaattatataaaaagaaattaagacaaccaagagaaacatggacatatacctcctgactgaatactaactggagacctttcatttgctcatggggctgcttaaatagcaggtctaagaaagtgtaaattattataatcaatctgtggacagtaaactttttaaaaatttttcttctgcatttttggttttataaaatgatgtattataaaggtcagttattaaattactttgaagtaactgaccctgtgcccttatggactaagtaagggtacagaatgcagttctgttttgaagagctgttttaagggaacatgcatcactttcgggttcaaaaacaactgtacacatacatatctgcagtgtcttcactgaaaattagagatagaattagttgaagagacttccttaattgctacattgttttactcactgagcaatatcagaaactaaaacatagattaataattcactcactgtttctattcttcttaaaaagagtgaaatctttttaatggaatggttgaagattcctgccaactcaaaatacagtacagctagtaaaatgttgaaacatcagtttctaaatcacctttgctccattagctaattttttggacactaaatgcttcaaagataagaaacttcatcctaatgatttctaaagagcagttaaaagcattaaaataagtaggtaggctgttaagattaaaattaacattttggggacagaattgtgtctgtaaaaatgtcattggttttattacaagtggattattttattcatattttaaaacaaatgtttaagccacattgatttatcctcattgaggattatggtctgtgaccacagtaatatccacttatataaatgccaaataatcagagagcttataaagtacaattgtttttgtcatcattttctgaatttctttctcttcttttggttttgtcctctcattgaagttccagtggtttgaaattagttttggacacattgtcttaatgtactgaaaattgctctgctgtattttgcagcgttcttcatttaatttataatggtccatattagacacatttggtaagagaagtccaggaacacatttagggccatggaatagtattttgtaaaatccatttgggaagttgcaatacccacaatctgacatgtcctaaaatgtaagggattatctctaaggggttgatgggagaaatatttagatgtaccctgttaacagccagtcattttgatttacttatggaaatcaagtgaataaaaggcaacataatttgggaaattttattctaatatctaataaaaacagtttgagtggttgaagacatctgcatgaaattgcacctaggtgcattacttgatataactctcccctaaaactgttgtaattgcattttttcccttttcttggcacccctttagaaatgtactgaagtctcatttttcacccatttcagccatgggacatttttcataatattaatgtaaagatgtttgtgttactgtttataaattacaattgtaaataaattactagtttgcccaaaaaaaaaaaaaaa

SEQ ID NO: 177 - DNA, 1810 bp, Homo sapiens
  CDS (71)..(1183)
taagcttgcggccgcctctgctctcagtgccccggatcggaggccgtccatcgcccctcgggccgacgccatgaagatcaaagatgccaagaaaccctctttcccatggtttggcatggacattgggggaactctagtaaagctctcgtactttgaacctattgatatcacagcagaggaagagcaagaagaagttgagagtttaaaaagtattcggaaatatttgacttctaacgtggcatatggatccaccggcattcgggatgtacaccttgaactgaaagatttaacactttttggccgaagagggaacttgcactttatcaggtttccaacccaggacctgcctacttttatccaaatgggaagagataaaaacttctcaacattgcagacggtgctatgtgctacaggaggtggtgcttacaagtttgaaaaagattttcgcacaattggaaacctccacctgcacaaactggatgaacttgactgccttgtaaagggcttgctgtatatagactctgtcagtttcaatggacaagccgagtgctattattttgctaatgcctcagaacctgagcgatgccaaaagatgccttttaacctggatgatccctatccactgcttgtagtgaacattggctcaggagtcagtattttagcagtccattccaaagacaactataaacgagtgactgggacaagccttggagggggtacctttctgggtttatgcagtttattgactggctgtgaaagttttgaagaggctcttgaaatggcatccaaaggtgatagcacacaagctgacaagctggtccgtgatatttatggaggagattatgaaagatttggtttgccaggttgggctgtagcatctagttttgggaatatgatttataaggagaagcgagaatctgttagtaaagaagatctggcaagagctactttagttactatcaccaataacattggttctgtggcacgaatgtgtgctgttaatgagaaaataaacagagttgtctttgttggaaactttttacgtgtcaataccctctcaatgaaacttttggcatatgcactggattactggtcaaaaggtcaactaaaagcattgtttctagaacatgagggttactttggagcagttggtgcacttcttgggctgccaaatttcagctaaagcatcaggtctctctctctgctaataaatgtcatccaagaggaactaaaaccagaggcattattactgcattgtttgtcactgggaaccaaaggataaaagagtagcataagctgctgaatgttgccatattaaaggagagaacttggtaacgtgaagtatttctcattgaaatgctttcccttttgtatatagccagtgttaaatccttaaatgcaatacagcctctgattattgagcttcctcttaaaaagatttttttattttatgtagccaacattgcagtactgtatgctcaaacacaaatcttaaagtatcggaactgtttagcttatgaaaataatcgactctgaatatttgttacaagtctgttttatgtgttttgattactagtgagcagaaaataacataccctgtattcaaaattactgaaatggcaatcaaagatgatcatttttatgtgattttagaaatgttaaggcaatactactaattattgtaggtttttttaacgtatcacccaaagcatgtatgtgatctttccccattagtatctttttctcaaatgccataattaactgaaatactattattaaattttcatgagaattctaaaaaaaaaaaaaa

SEQ ID NO: 178 - DNA, 1753 bp, Homo sapiens
  CDS (153)..(1175)
caccgatttatggtgctgacatcagtggctccttgtttgatgaaaacactaaacaatggaatcttgggcacctgggaacaattcaggacctgctggaaaaggaatgtggggttgtcatagaaggcgtcaatacaccctacttgtactttggcatgtggaaaaccacgtttgcttggcatacagaggacatggacctttacagcatcaactacctgcaccttggggagcccaaaacttggtatgtggtgcccccagaacatggccagcgcctggaacgcctggccagggagctcttcccaggcagttcccggggttgtggggccttcctgcggcacaaggtggccctcatctcgcctacagttctcaaggaaaatgggattcccttcaatcgcataactcaggaggctggagagttcatggtgacctttccctatggctaccatgctggcttcaaccatggtttcaactgcgcagaggccatcaattttgccactccgcgatggattgattatggcaaaatggcctcccagtgtagctgtggggaggcaagggtgaccttttccatggatgccttcgtgcgcatcctgcaacctgaacgctatgacctgtggaaacgtgggcaagaccgggcagttgtggaccacatggagcccagggtaccagccagccaagagctgagcacccagaaggaagtccagttacccaggagagcagcgctgggcctgagacaactcccttcccactgggcccggcattccccttggcctatggctgcccgcagtgggacacggtgccacacccttgtgtgctcttcactcccacgccgatctgcagttagtggcactgctacgcagccccgggctgctgctgtccacagctctaagaagcccagctcaactccatcatccacccctggtccatctgcacagattatccacccgtcaaatggcagacgtggtcgtggtcgccctcctcagaaactgagagctcaggagctgaccctccagactccagccaagaggcccctcttggcgggcacaacatgcacagcttcgggcccagaacctgagcccctacctgaggatggggctttgatggacaagcctgtaccactgagcccagggctccagcatcctgtcaaggcttctgggtgcagctgggcccctgtgccctaagtccacgggctgtctttatatcccactgccctgctgtgtgacagtttgatgaaactggttacatttacatcccaaaactttggttgagtttgcaggactctaggcatgcatgaaagagcccccctggtgatgcccttggatgctgccaagtccatggtagttttcaattttgccatacttttgttcttcctaccggaccctggaatgtctttggatattgctaaaatctatttctgcagctgaggttttatccactggacacatttgtgtgtgagaactaggtcttgttgaggttagcgtaacctggtatatgcaactaccatcctctgggccaactgtggaagctgctgcacttgtgaagaatcctgagctttgattcctcttcagtctacgcatttctctcttcccctccctcaccccctttttcttataaaactaggttctttatacagataaggtcagtagagttccagaataaaagatatgacttttctgagttatttatgtacttaaaatatgttgtcacagtatttgttcccaaatatattaaaggtaaccaaaatgttaaaaaaaaaaaa

What is claimed is:

1. An isolated polynucleotide comprising a nucleotide sequence selected from the group consisting of SEQ ID NO: 1-178, a mature protein coding portion of SEQ ID NO: 1-178, an active domain of SEQ ID NO: 1-178, and complementary sequences thereof.

2. An isolated polynucleotide encoding a polypeptide with biological activity, wherein said polynucleotide hybridizes to the polynucleotide of claim 1 under stringent hybridization conditions.

3. An isolated polynucleotide encoding a polypeptide with biological activity, wherein said polynucleotide has greater than about 90% sequence identity with the polynucleotide of claim 1.

4. The polynucleotide of claim 1 wherein said polynucleotide is DNA.

5. An isolated polynucleotide of claim 1 wherein said polynucleotide comprises the complementary sequences.

6. A vector comprising the polynucleotide of claim 1.

7. An expression vector comprising the polynucleotide of claim 1.

8. A host cell genetically engineered to comprise the polynucleotide of claim 1.

9. A host cell genetically engineered to comprise the polynucleotide of claim 1 operatively associated with a regulatory sequence that modulates expression of the polynucleotide in the host cell.

10. An isolated polypeptide, wherein the polypeptide is selected from the group consisting of:
(a) a polypeptide encoded by any one of the polynucleotides of claim 1; and
(b) a polypeptide encoded by a polynucleotide hybridizing under stringent conditions with any one of SEQ ID NO: 1-178.

11. A composition comprising the polypeptide of claim 10 and a carrier.

12. An antibody directed against the polypeptide of claim 10.

13. A method for detecting the polynucleotide of claim 1 in a sample, comprising:
a) contacting the sample with a compound that binds to and forms a complex with the polynucleotide of claim 1 for a period sufficient to form the complex; and
b) detecting the complex, so that if a complex is detected, the polynucleotide of claim 1 is detected.

14. A method for detecting the polynucleotide of claim 1 in a sample, comprising:
a) contacting the sample under stringent hybridization conditions with nucleic acid primers that anneal to the polynucleotide of claim 1 under such conditions;
b) amplifying a product comprising at least a portion of the polynucleotide of claim 1; and
c) detecting said product and thereby the polynucleotide of claim 1 in the sample.

15. The method of claim 14, wherein the polynucleotide is an RNA molecule and the method further comprises reverse transcribing an annealed RNA molecule into a cDNA polynucleotide.

16. A method for detecting the polypeptide of claim 10 in a sample, comprising:
a) contacting the sample with a compound that binds to and forms a complex with the polypeptide under conditions and for a period sufficient to form the complex; and
b) detecting formation of the complex, so that if a complex formation is detected, the polypeptide of claim 10 is detected.

17. A method for identifying a compound that binds to the polypeptide of claim 10, comprising:
a) contacting the compound with the polypeptide of claim 10 under conditions sufficient to form a polypeptide/compound complex; and
b) detecting the complex, so that if the polypeptide/compound complex is detected, a compound that binds to the polypeptide of claim 10 is identified.

18. A method for identifying a compound that binds to the polypeptide of claim 10, comprising:
a) contacting the compound with the polypeptide of claim 10, in a cell, under conditions sufficient to form a polypeptide/compound complex, wherein the complex drives expression of a reporter gene sequence in the cell; and
b) detecting the complex by detecting reporter gene sequence expression, so that if the polypeptide/compound complex is detected, a compound that binds to the polypeptide of claim 10 is identified.

19. A method of producing the polypeptide of claim 10, comprising,
a) culturing a host cell comprising a polynucleotide sequence selected from the group consisting of a polynucleotide sequence of SEQ ID NO: 1-178, a mature protein coding portion of SEQ ID NO: 1-178, an active domain of SEQ ID NO: 1-178, complementary sequences thereof and a polynucleotide sequence hybridizing under stringent conditions to SEQ ID NO: 1-178, under conditions sufficient to express the polypeptide in said cell; and
b) isolating the polypeptide from the cell culture or cells of step (a).

20. An isolated polypeptide comprising an amino acid sequence selected from the group consisting of any one of the polypeptides from the Sequence Listing, the mature protein portion thereof, or the active domain thereof.

21. The polypeptide of claim 20 wherein the polypeptide is provided on a polypeptide array.

22. A collection of polynucleotides, wherein the collection comprising the sequence information of at least one of SEQ ID NO: 1-178.

23. The collection of claim 22, wherein the collection is provided on a nucleic acid array.

24. The collection of claim 23, wherein the array detects full-matches to any one of the polynucleotides in the collection.

25. The collection of claim 23, wherein the array detects mismatches to any one of the polynucleotides in the collection.

26. The collection of claim 22, wherein the collection is provided in a computer-readable format.

27. A method of treatment comprising administering to a mammalian subject in need thereof a therapeutic amount of a composition comprising a polypeptide of claim 10 or 20 and a pharmaceutically acceptable carrier.

28. A method of treatment comprising administering to a mammalian subject in need thereof a therapeutic amount of a composition comprising an antibody that specifically binds to a polypeptide of claim 10 or 20 and a pharmaceutically acceptable carrier.
